United States Patent Application Publication US 2025/0018062 A1 - sequence listing, part 12

SEQ ID NO: 20048 - DNA, 1170 bp, synthetic construct
  misc_feature 1..1170: note = source = /note="Description of Artificial Sequence: Synthetic coding sequence"
  source 1..1170: mol_type = other DNA
atgccaccgtccggactccgcttgctcccgctgctcctgccactgctgtggctgctcgtgttgaccccgggcaggccagcggcgggactgtcaacctgcaaaactatcgatatggaattggtgaagagaaaacgcatcgaggccatcaggggacaaattctgtccaagctgcggttggcctccccgccaagccaaggagaagtgcccccaggtccactgcccgaggccgtgctcgccctgtacaacagcactcgcgaccgcgtggcaggagagtccgcagaaccggagccagaaccggaagcagattactacgcgaaagaagtgactagagtcctgatggtggaaactcacaacgagatctacgataagttcaagcagtcaacgcacagcatctacatgttcttcaatacctccgaactccgagaagccgtcccggaacccgtcctgctctccagagccgaacttcgcctcctgcgcctgaagctgaaggtggagcagcacgtggagctctatcagaagtactcaaacaattcgtggaggtacctgtccaacaggctgctggccccgtcggactcccctgaatggctcagtttcgacgtgaccggagtcgtgaggcagtggttgagccgcggaggagaaatcgaaggattcagactgtcggcacactgttcctgtgactctcgcgacaacaccctgcaagtggatatcaacggatttaccaccggccgccgcggggatctggcaactatccatgggatgaaccgcccattcctgctgctgatggcaacccctcttgaacgcgcccagcatctccagtcgtcccggcaccggcgcgcgctggacaccaactactgtttcagctcgactgaaaagaattgttgcgtcagacagctgtacatcgatttcagaaaggatctcggctggaaatggatccacgagccgaagggataccacgctaacttttgtcttggcccgtgtccgtacatctggtccctggacactcagtattccaaggtgctggccctctataaccaacataatccaggagccagcgctgcgccatgctgcgtcccacaggcactggaaccgctgccgattgtgtactacgtgggaaggaaaccaaaggtcgagcagctctctaacatgatcgtgcggtcatgcaaatgctcg

SEQ ID NO: 20049 - DNA, 1170 bp, synthetic construct
  misc_feature 1..1170: note = source = /note="Description of Artificial Sequence: Synthetic coding sequence"
  source 1..1170: mol_type = other DNA
atgccgccctcaggcctcaggctgttgccactgctgctgcccttgctctggcttcttgtgctcacccctggaagaccagccgccggactgtcgacatgcaagacaattgatatggagctggtgaaacggaagagaatcgaagctataaggggacaaatcctttcaaaactcaggttggcctctccaccctcccagggggaggttccaccgggacctctgcctgaggctgtgctggccctatacaacagcacaagggacagagttgctggcgaatctgctgaacccgagcccgaaccagaagctgattattatgctaaagaagttacccgagtgctgatggtggaaacacataacgaaatttatgacaaattcaagcagagtacccacagcatttacatgttctttaacactagcgagcttagggaagccgtacctgagcctgtgctcttgtcgagagctgaactccgtctgctgcgacttaaacttaaagtggagcagcacgtcgagctgtatcaaaagtactctaataacagttggagatacctctctaacagactgctagcacccagcgactcacctgaatggctcagttttgacgtgacaggcgtggtccgccagtggctcagtaggggaggagaaatcgaaggatttaggctgagcgcccactgctcgtgcgacagtagagataacaccttgcaggtcgacataaacggtttcactaccggaagaaggggggacctcgccacaatccatggaatgaaccggcccttccttctcctgatggccacaccgctcgagagagcccaacatctgcagtcaagccggcataggagggcgctggacactaactactgttttagcagtacagaaaaaaattgttgtgtccgtcaactctatatagattttcgcaaggatctcggatggaaatggatccacgagcccaagggatatcacgctaacttctgcctggggccgtgcccctatatttggagcttggatactcaatatagcaaagtactggctctgtacaatcaacacaatcccggagcttccgctgctccgtgctgcgtaccccaggccctcgagccactacccattgtatactatgttggtagaaaacctaaagtggaacaactgagcaatatgatcgtacgcagttgcaagtgctca

SEQ ID NO: 20050 - DNA, 1170 bp, synthetic construct
  misc_feature 1..1170: note = source = /note="Description of Artificial Sequence: Synthetic coding sequence"
  source 1..1170: mol_type = other DNA
atgccgccatccggacttaggctgctgcctctgcttcttccgctgctgtggctgttggtactgactccgggccggcctgcggcgggtctgtcgacgtgcaaaaccatcgacatggagctggtcaaacggaaacgcatagaagcaattcggggtcagatcctgagcaagctcagactggcttcgcccccctcccagggtgaagtgcctccgggaccgcttcctgaagctgtgctcgctttgtacaatagcacccgggacagggtcgctggagagtcggccgagcccgagccagagccagaggccgactactacgcgaaagaagtcacccgagtgcttatggtggaaactcacaatgagatctacgataagtttaagcaaagcactcattcgatatacatgttcttcaatacttccgagctcagggaagctgtcccagaaccagtgttgttgtcacgggctgaactgcggctgctgcgcctgaagctcaaagtggaacagcatgtcgaactgtaccagaagtattcaaacaacagctggcgctacctgtctaaccgactgctggcccccagcgactccccggagtggctgagctttgacgtgactggagtggtccgtcaatggcttagccgcggcggagaaatcgaagggtttagattgtccgcccactgttcatgcgactcaagagataacaccctgcaggtcgacattaatggcttcaccaccgggcggcgcggagatctggcaactattcacggcatgaaccgcccgtttctgcttctgatggccacgcctctggagcgggcgcaacatctgcaatcaagtagacaccgccgggccctggacaccaactattgcttctcgtccaccgagaagaactgttgtgtcagacagctgtacatcgattttcgcaaggatctcggttggaagtggatccacgaaccaaagggctaccatgctaatttctgcctcggaccgtgcccgtacatctggtccctggacacgcagtacagcaaggtgctcgccctgtacaaccaacataatcctggtgcaagcgccgccccgtgctgcgtgccgcaggctctggagccgctgccgatcgtttactacgttggacgcaaaccgaaggtggaacagctctcaaatatgatcgtccggtcctgcaagtgctcg

SEQ ID NO: 20051 - DNA, 1170 bp, synthetic construct
  misc_feature 1..1170: note = source = /note="Description of Artificial Sequence: Synthetic coding sequence"
  source 1..1170: mol_type = other DNA
atgccaccgtccggcctccgccttctgcctttgctcctgcccttgctgtggctgcttgtgttgacgcccggcagacctgcggcgggcctttcaacctgtaagactattgacatggaactggtgaagcgcaaaagaatcgaagcaatcagaggacagattctttccaagctgcgacttgcctcacctccatcacagggggaggtcccaccaggacctctgccagaagcagtgctggccctgtacaattcaacgcgtgaccgtgtggcgggggagagcgccgagcctgaacctgaacccgaggcggactactacgcaaaagaggtgactagagtgctcatggtcgaaactcataacgagatttacgacaagtttaagcagtccacccatagcatctacatgtttttcaatacttcagagctccgggaagctgtgccagaaccagtgttgctttcgcgtgcagagcttcggcttctgcgcctgaagttgaaggtcgagcaacacgtggaactgtaccaaaagtactcaaacaattcgtggcgatacctttcgaaccggttgcttgcaccttcggatagtccagagtggctctcatttgatgtgaccggagtcgtcagacagtggctctcgcggggtggagaaattgaaggttttcggctctcggcacattgttcctgtgactccagggataatactctgcaagtggacattaacggatttacgactggacgcaggggcgatctggcaacgattcacggaatgaatcggccatttcttcttttgatggcaaccccacttgagcgagcacaacatctgcagtcgtcgcgtcatcgccgggctcttgataccaattactgcttttcgtcgaccgaaaagaactgttgtgtcaggcaattgtacattgactttcggaaagatcttggttggaaatggatccatgaacctaaagggtaccacgcaaatttctgtctgggtccttgtccatacatttggtccctggatacccagtattcaaaggtgcttgccctttacaaccagcacaatccgggggcctccgctgcgccatgttgcgtgccccaagcacttgagccccttccgattgtctactacgtgggaagaaagccaaaggttgagcaacttagcaacatgattgtgaggtcctgcaaatgttcg

SEQ ID NO: 20052 - DNA, 1170 bp, synthetic construct
  misc_feature 1..1170: note = source = /note="Description of Artificial Sequence: Synthetic coding sequence"
  source 1..1170: mol_type = other DNA
atgcctccatccgggctcagactcctaccactgttgcttccattgttatggctcctcgttttgactcctggaagacctgccgctggactttctacatgcaaaacaattgatatggaattagtgaaacgtaaacgcatcgaagcaatccgggggcagatactctccaagctgcgcctcgccagtcctccctctcagggggaggtgccaccaggaccactccctgaagccgtgctcgctctatacaactcaactcgggatagggttgctggggaatcagctgaacctgaaccagaacccgaagcggattattatgcaaaagaagttactcgggtgctcatggtagaaacacataatgaaatctatgataaattcaaacagtctacacattctatatatatgttcttcaatacatccgaacttagagaagctgtgcccgagcccgtactcctctcacgagctgaactccggctcttacgcctcaaactgaaggtagaacagcatgtagaactttatcagaaatattcaaacaactcttggaggtatctttcaaataggttgctcgcacctagtgattcaccagagtggctgtcgtttgatgtgacaggagttgtgcgacagtggctctcaagagggggagaaatagagggatttcggctgagtgcacattgttcgtgtgatagtagggataatacactccaggtagatatcaatgggttcacaactgggcggcgcggggatcttgcaacaatacacggaatgaatcggccttttcttttattaatggccactccattagaacgcgcccagcacctgcagagttcccggcacagacgtgccctggatacaaactactgcttttctagtactgaaaaaaactgttgtgttcggcagctttatatagattttaggaaggatcttggatggaagtggatccacgagcctaaaggatatcacgcaaatttttgcctagggccctgcccttatatatggagtcttgacactcagtacagtaaagtgctcgctctctacaatcagcacaacccaggagcttcagcagccccctgctgtgtccctcaggcattagaaccgctacctatagtgtattatgtggggcggaaacctaaggtagagcagctctccaatatgatcgtgcgaagttgcaaatgttcc

SEQ ID NO: 20053 - DNA, 1170 bp, synthetic construct
  misc_feature 1..1170: note = source = /note="Description of Artificial Sequence: Synthetic coding sequence"
  source 1..1170: mol_type = other DNA
atgccgccatccggactgcggctgctcccactgcttctcccccttctgtggcttcttgtgttgactcctggacgcccggccgccgggctctcgacctgcaagacgatcgatatggagctggtgaaacggaagcgtatcgaggcgatcagaggacaaatcctctcgaaactgagattggcttcccctccatcccagggagaagtgccgcctggaccactgcctgaagccgtgcttgctctctacaattcgactagagatcgggtcgctggagaatcagcagaacctgaaccggaaccggaagccgactactacgctaaggaggtaaccagagtgttgatggtggagactcataacgaaatctacgataagttcaagcaaagcacccacagcatttacatgttcttcaacacctccgagctccgcgaggcagtccccgagcctgtgctcttgagcagagctgagctgcgtctgttgaggctgaagctgaaggtggagcaacatgtcgaactctaccaaaagtactcgaataattcatggcggtacctctcaaacagattgctggctccgtctgactcgccggaatggctctcgttcgatgttactggagtggttagacagtggttgtcacggggcggagaaatcgaaggatttcgcctgtcggcccactgtagctgcgatagtcgggacaatacccttcaggtggacatcaacggattcaccaccggccggagaggggacctggccacgatccacggaatgaacaggccattcctgcttctcatggcgacccccttggagcgcgcccaacaccttcagtcctcacgacacaggagagcactcgataccaactactgcttttcaagcactgagaagaactgctgcgtgcgccagttgtatatagacttccgcaaggacctcggctggaagtggatccatgaaccaaaaggataccatgctaatttctgcttgggcccctgtccatatatctggtccctggatactcaatacagcaaagtgctggccctgtacaaccagcacaacccgggagcctcagccgccccatgttgtgtcccacaagcgctcgaaccactgccgatcgtgtattacgtggggcgcaaaccgaaggtggaacagctctcgaatatgatcgtgcgatcctgcaagtgctca

SEQ ID NO: 20054 - DNA, 1170 bp, synthetic construct
  misc_feature 1..1170: note = source = /note="Description of Artificial Sequence: Synthetic coding sequence"
  source 1..1170: mol_type = other DNA
atgccgcccagcggactaaggttactgccattgctcttgcctcttctttggcttttggttctgaccccaggacgacccgccgccggcctcagcacttgtaaaaccattgacatggaactggtcaaacgtaagcggatcgaggccataagggggcagattttgtccaagctcaggctagcatcacccccatcacagggcgaggtgccacctggtccactgccagaagctgtgctggcactctataattcaactagagatagggtggctggcgagtccgccgagccagaacccgagcccgaggctgactattacgccaaagaagtcactcgggtcctgatggtagagacccataatgaaatctatgataagttcaaacagagcacacactccatatacatgtttttcaacacttccgaactgcgcgaagccgtaccagagcccgtccttttatcaagggccgagctgcgtctgttaaggctgaaactcaaggtcgaacaacacgtcgagctgtatcagaagtattctaacaattcctggaggtacctgagtaatagattgctcgctccctccgattcccccgaatggctgtcgttcgacgtgaccggagtggtccggcagtggctttcgagggggggcgaaattgaaggctttcgcttgagcgcacattgctcctgcgatagccgggataatacactgcaggtggatataaatgggttcaccacaggcaggaggggagacttggctaccattcatgggatgaatagaccattcttactgcttatggcgacccccttggagagggcacaacacctgcaaagttcaaggcacaggcgtgcactagatactaattactgtttcagctcaacagagaagaattgctgcgtgcggcagttatatatcgattttaggaaggacctgggatggaaatggattcacgaaccaaagggttaccacgccaacttttgtctcgggccgtgtccctacatttggtcccttgatacccaatattcaaaagtgttggctctctacaaccagcataaccccggcgcctccgcagccccctgctgcgtacctcaggctcttgaacctttgcctatcgtgtattacgtaggccgaaaacccaaagtagagcagctctccaacatgatcgtgaggagttgtaagtgtagc

SEQ ID NO: 20055 - DNA, 1170 bp, synthetic construct
  misc_feature 1..1170: note = source = /note="Description of Artificial Sequence: Synthetic coding sequence"
  source 1..1170: mol_type = other DNA
atgcctccaagtggccttagactccttccgctacttctgccactgctgtggctgctggttctgacacctggcagacctgccgctggcttgagcacatgcaagacaatcgatatggaactagtcaagcgcaaacggattgaggctatccgggggcaaattctttccaaactgagacttgcaagcccaccatctcagggcgaggttcctccagggcctctgcccgaggccgttttagccctgtacaactcaaccagggaccgcgtcgccggagagagcgccgaacctgaacctgagcccgaagccgattactatgctaaagaagtcaccagagtactgatggtcgagacccacaacgagatatacgataagttcaaacagtctacacatagcatctacatgttcttcaacacttctgagctgagagaggctgtgcccgaaccagttctgctcagccgcgcagagttacggctgttacggctgaagctgaaagtcgaacagcacgtcgagctataccagaaatacagtaataattcatggcggtatttgtctaaccgcttacttgcccccagcgactcccccgaatggctatccttcgacgttaccggcgtcgtgaggcagtggctaagtcgcggaggggagattgaggggttccggctgtccgcccactgctcttgtgattcccgcgacaatactctgcaggtggacatcaacggatttacaaccggccgccgaggcgacctggctaccatccacggcatgaacagacctttcctgctgcttatggccacacccctggaacgggcacaacacttgcagtcctccaggcaccgccgggccctcgataccaattactgcttctcttctacagagaaaaattgttgcgtgcgccagctatatattgacttcagaaaggacctgggatggaagtggattcacgaacctaaaggctaccacgcaaatttttgcctgggtccttgcccctacatttggtctctggatacacagtacagcaaagttcttgccctgtacaaccagcataatcccggcgcaagcgccgccccttgttgcgttcctcaggctctcgaaccacttcccatcgtgtattatgtcggccgcaaacctaaagttgagcaactcagcaacatgattgtcaggagttgcaagtgttct

SEQ ID NO: 20056 - DNA, 1170 bp, synthetic construct
  misc_feature 1..1170: note = source = /note="Description of Artificial Sequence: Synthetic coding sequence"
  source 1..1170: mol_type = other DNA
atgccgccgagcggtctgcgccttctgcctttgctgttaccactgttatggctcctggtgctgacgccgggtcgccccgctgctggtctaagcacctgcaagacaatagacatggaactggtgaagcgcaaacgcattgaggcgattcgcggccaaatactgtctaagctgagattggcttctcctccgagccaaggtgaagtccctccgggcccactgcctgaagcagtattggcgctgtacaacagcacacgtgatcgtgtcgctggtgaatccgcagagccggaaccggaacctgaggcagattattatgcaaaagaagttacgcgcgtgctgatggtggagacgcacaatgagatatatgataaattcaaacagtccactcatagcatctacatgttctttaatacgagcgagttgcgcgaggcagtgccggagccggtccttctttcccgcgcagagctgcgtctgttacgcctgaaactcaaggtggaacaacacgtggaactgtatcaaaaatatagcaacaatagttggcgctatctgagcaacagactgttagcgccttctgattctccggaatggctgagcttcgacgttactggtgttgttcgccagtggctgagccgcggtggggagatagaagggtttcgcctgtctgcacattgtagttgtgacagcagagacaataccctgcaggtagacatcaacggtttcactaccgggcgcagaggtgatctggccaccattcatggcatgaatcgcccttttctgttgctgatggcaactccgctggagcgcgcccagcacttgcaaagcagccgccaccgtcgcgcgcttgatacgaattattgctttagctctacggagaaaaattgttgtgtgaggcagttatacattgacttccgtaaagatctgggctggaagtggatccatgaaccaaagggctaccatgctaatttctgtctggggccatgtccgtacatttggagcctcgacacacagtactctaaagttcttgcgctgtataaccaacacaatcctggtgcgtctgcagcgccatgttgtgtcccgcaagcgctggagccactgccaatagtgtactacgttggtaggaagcctaaagttgagcagctgtcgaacatgattgtgcgcagctgtaaatgcagc

SEQ ID NO: 20057 - DNA, 1170 bp, synthetic construct
  misc_feature 1..1170: note = source = /note="Description of Artificial Sequence: Synthetic coding sequence"
  source 1..1170: mol_type = other DNA
atgcccccctccggtttaagattgctgccactcttactgccactgctgtggttgttggtcttgacaccaggaaggccagcagcaggcttgagtacttgcaagaccatcgacatggagctcgtgaagagaaagcgcattgaagccatccggggacaaatcctgtcgaaacttcgcttggcttcgcccccaagtcaaggtgaggtgcccccagggccactgcctgaggccgtgctggctttgtacaactctacgagagacagggtggctggcgaatcagctgaaccagaaccagagccggaggccgattactacgccaaagaggtaacgcgggtcttgatggttgagacacacaacgagatatacgacaagtttaagcaatccactcatagtatatatatgttctttaatacatccgagctgcgagaagccgtcccagagcccgtgctcttgtcacgggccgaactgaggctcctgagattgaaactaaaagtcgagcagcatgttgagctctaccaaaagtactctaacaactcatggcgatatctctcgaacaggctcctggcccctagtgattcccccgaatggctgtcatttgacgtgaccggagtagttagacagtggctgagcagaggcggggagatcgaggggtttaggttatccgctcactgcagctgcgattctagagataacacattgcaagttgacatcaacggcttcactaccgggcgccggggtgatctcgcgaccatccatggaatgaacagaccatttctactactgatggctacaccattggaacgtgctcagcacctacagagttcacgtcataggagggcacttgacacgaattactgctttagctcaaccgaaaagaattgctgcgtgcgccagctatatatcgacttccggaaggatctgggatggaagtggatccacgagcccaaagggtaccacgctaacttttgccttggcccatgcccctatatttggtctttggatacccagtatagtaaggtcctggccctctataaccaacataacccaggggcatcggctgcgccatgttgcgtcccacaggccctcgagccgctgccaatagtttactacgtgggcaggaagcctaaggtggagcagctgtctaacatgattgtgcgttcctgtaaatgctca

SEQ ID NO: 20058 - DNA, 1170 bp, synthetic construct
  misc_feature 1..1170: note = source = /note="Description of Artificial Sequence: Synthetic coding sequence"
  source 1..1170: mol_type = other DNA
atgcccccgtccggactgcgcttgctcccgctgcttctgccactgttgtggttgctggtgctgacgccagggcggccagccgcaggcctttccacctgtaagactatcgatatggagctggtgaaacgcaaacggatcgaagcaatccggggacaaatcctgagcaaactgaggctcgctagccctccatcccagggtgaagtcccaccggggccgcttcccgaagcagtgcttgcactctacaattctactcgggacagagtggctggagaatcggcggaacccgagccagagccagaagcagactactacgcaaaagaggtcaccagggtgctgatggtggaaactcataacgagatctacgataagttcaagcagtccactcactccatttacatgttcttcaatacttccgaattgcgcgaagcggtcccagaacctgtgttgctgtcccgcgcagagctgagacttttgaggcttaagctgaaagtggaacaacatgtggagctttaccaaaagtactcaaacaattcctggcggtatctctccaatcgcctcttggcccccagcgattcgcctgaatggctttcgttcgatgtgaccggagtcgtccggcaatggctgtcacgtggaggggaaatagaggggtttaggcttagcgcacattgttcgtgtgattcacgggacaataccctgcaggtggatatcaacggattcaccacgggaaggagaggggatctcgcgaccatccatggcatgaatcgtccttttctgctccttatggcaactcctcttgaacgcgcgcagcaccttcagtcatcacgacatagaagagcccttgacacgaactactgcttttcgtcgaccgagaaaaactgctgtgtccgccaactgtacatcgactttcggaaggatcttgggtggaaatggattcatgaacctaagggttaccatgcaaatttctgtctgggaccgtgtccatacatctggtcgctcgatacccaatactccaaagttcttgccctgtacaaccaacacaacccaggagcctcagcagccccttgctgcgtgccacaagcacttgaacccctcccaattgtgtattacgtgggacgcaagcctaaggttgagcaactctcgaatatgattgtccggtcgtgtaagtgttcc

SEQ ID NO: 20059 - DNA, 1170 bp, synthetic construct
  misc_feature 1..1170: note = source = /note="Description of Artificial Sequence: Synthetic coding sequence"
  source 1..1170: mol_type = other DNA
atgcctccatcggggctcagactgcttccactgcttctccctctgctttggctcctcgtgctgaccccagggcgtcccgcagcaggactgtcgacgtgtaagaccattgatatggaactcgttaaaaggaaaaggattgaggcaatccgcggtcaaattctctcgaagctgcggctggcgtcgcctccctcgcaaggagaagtgcctcctggacctctccctgaagccgttctcgcactttacaactccactcgggaccgcgtggccggggaatctgccgagcccgaacccgaacctgaagcagattactatgcaaaggaagtcactagagttcttatggtcgagacgcacaacgagatttacgacaagtttaagcagtccactcattccatatacatgtttttcaatacctccgagcttcgggaagccgtgccagagcccgtgcttctgagccgcgcagagttgcgccttctcagactgaagctgaaagtggagcagcacgtggaactgtaccaaaagtattccaataactcatggaggtatctctcaaatcgactcctggctcccagcgattcacccgaatggctttcctttgacgtaaccggcgtcgtcaggcagtggctgtcacgtgggggtgagatagaaggattccgcctgtccgctcactgttcctgtgacagccgtgataacactcttcaggtcgatatcaatggattcaccaccgggcggcggggtgatcttgcaaccattcacggaatgaatagacctttcctgcttctgatggcgacccctcttgaacgggcccaacatctgcagagctccaggcatagacgcgcccttgataccaactactgcttttcatccactgaaaagaattgttgtgtgcgccaactgtacatcgatttccgaaaggatctcggttggaagtggattcatgaaccaaaggggtaccatgcaaacttctgtcttggtccatgtccatacatatggtctttggacacccaatactcaaaggtgcttgccctctataaccaacataaccccggagcatcagcggccccatgttgtgtgccacaggccctggaaccccttcctatcgtgtactacgtgggtcgaaaaccaaaggtcgagcagctgtcgaatatgattgtgcgttcatgtaagtgttcc

SEQ ID NO: 20060 - DNA, 1170 bp, synthetic construct
  misc_feature 1..1170: note = source = /note="Description of Artificial Sequence: Synthetic coding sequence"
  source 1..1170: mol_type = other DNA
atgccgccgtcagggctgcgcctgctgcccctgctgctgccgttgctctggctgctcgttctgacgccgggacgacctgccgccggactctcaacttgcaagactatcgacatggaattggtcaagagaaagagaatcgaagccattagaggacagatcctctctaagctgcggctcgcctctcccccgagccaaggagaagttccaccggggccgctgcccgaagccgtcctggctctgtacaacagtacccgcgatcgcgtggctggggaatccgcagagccagaacccgagccggaagctgactactacgcgaaggaagtgactcgggttctgatggtggaaactcacaacgagatctacgataagttcaaacagagcacccactccatctacatgttcttcaatacttcggagctgagggaggctgtgccagagcctgtgctgctgtccagggcggagttgcggctccttagactgaagctgaaagtcgaacaacacgtggagttgtaccagaagtacagcaataactcctggcggtacctgagcaatagactgctcgcgccgtccgactccccagaatggctcagctttgatgtgactggagtggtgagacagtggctgagccgcgggggcgagatcgagggattcaggctttctgcgcactgttcatgcgactcgcgcgacaatactctgcaagtcgacataaacggatttaccactggcagacggggagatctcgccaccatccacggaatgaatcgcccgttcctcctcctgatggcgaccccgctggagcgcgcacagcacttgcagagctcacgccacagaagggcgctggacaccaattactgcttctcgtcaaccgagaaaaactgctgcgtcaggcaactgtacatcgatttcagaaaagatctcggatggaagtggatccacgaacccaaaggctaccacgctaacttctgcctcggaccatgcccgtacatctggtccctcgacactcaatactcgaaggtcttggccctctacaaccagcataatccgggagcgtcagcggcaccatgttgcgtcccacaggctctcgaaccgctgcccatcgtgtactatgtggggcgcaagcctaaagtggaacaactctcaaacatgatcgtgcggtcctgcaaatgtagc

SEQ ID NO: 20061 - DNA, 1170 bp, synthetic construct
  misc_feature 1..1170: note = source = /note="Description of Artificial Sequence: Synthetic coding sequence"
  source 1..1170: mol_type = other DNA
atgccgccatcaggactgagactgctgcctctcctgctgcctctgctgtggttgctcgtgctcactccaggacgcccagccgcgggactgtcaacttgcaagactatcgacatggagcttgtgaagagaaagcgcatcgaagctatccgcggacaaatcctcagcaagctgcggctggctagccccccatcgcagggtgaagtgccaccgggaccactgcccgaagccgtgctggcgctgtacaactccacgcgggatcgcgtggccggagagtccgccgaaccagaacccgagcccgaagcagactactacgctaaggaagtgacgcgggtcctcatggtcgagactcacaacgagatctacgacaaattcaaacaatccacccactcgatctacatgttctttaacacgagcgaactgagggaagccgtgcctgagccagtgctgctgagccgcgcggagctcagactccttcgcctcaaattgaaggtcgagcagcatgtggaactgtaccagaagtactcaaataactcgtggcggtacctgagcaaccggctgttggccccttctgattccccggagtggctgtcctttgacgtgactggagtggtccggcagtggctgtcccggggaggcgagattgaaggcttccggcttagcgcgcactgctcgtgcgactcaagggataacactctgcaggtcgatatcaacgggttcactaccggccgccggggcgatctggcaacgattcacggcatgaatagaccgttcctccttcttatggccactcctctggagagagcccagcatctgcagtcaagccggcatcgcagggctctggacactaattactgctttagttccactgaaaagaattgctgcgtgcgccaactgtacatagatttcaggaaggacctcggttggaaatggatccatgagccaaagggataccacgcaaacttctgcctggggccttgcccgtacatctggtcgctcgacacccagtactcaaaagtcctggcgctctacaaccagcacaatcctggagcctcggcagcgccgtgttgcgtcccacaggccctggagcctctcccgatcgtgtactacgtaggacgcaaaccgaaggtggagcaactgagcaatatgattgtgcgctcctgcaagtgctcg

SEQ ID NO: 20062 - DNA, 1170 bp, synthetic construct
  misc_feature 1..1170: note = source = /note="Description of Artificial Sequence: Synthetic coding sequence"
  source 1..1170: mol_type = other DNA
atgccgccgtcgggacttcgcctccttcctctcctgctgccactgctgtggcttctggtcctcactccaggaaggccggccgctggcctgtcgacttgcaagactatcgatatggaactggtcaagcgcaagcggatcgaagcaatccgaggacagatcttgagcaagctgcgcctggcctcgcccccgtcgcagggtgaagtgcctcctggtccgctgccggaggcggtcctggcactctacaactccacgcgcgaccgggtcgctggagagtcagccgaaccggaacccgaaccagaggccgattactacgcgaaggaagtaacccgcgtcctcatggtggagactcacaacgagatctacgataagttcaaacagagcactcattcaatctacatgttcttcaacacctccgaattgcgggaggctgtgccagaacccgtgctgctgtcaagggcagaacttaggctgctccgccttaaactcaaggtggaacaacacgtggagctgtaccagaagtacagcaataactcgtggcggtacctgtccaacagactcctcgcaccgtccgattcgcctgaatggctgtcctttgacgtgaccggagtggtgcggcaatggctctctcggggaggggagatcgagggattccggctgtcggctcactgcagctgtgacagccgcgacaataccctccaagtggacatcaacggcttcaccactgggcgcagaggggacctggccaccattcatggaatgaacagaccgttcctgctcctgatggccacccctttggaaagagcgcagcacctgcagagctcacggcaccgccgcgccctggataccaattactgcttttcctcgactgagaaaaactgttgcgtgagacagctgtatatcgacttcagaaaagatttgggctggaagtggattcacgaacccaagggttaccatgcgaacttttgtctcggaccgtgcccgtacatctggtcactcgacacgcagtactcgaaagtcctcgcactgtataatcaacataatccaggcgcgtccgcggccccatgctgcgtccctcaagccctggagccgttgccgatcgtgtactacgtgggccgtaagccaaaggttgagcagctttcaaatatgattgtgaggagctgcaaatgctcc

SEQ ID NO: 20063 - DNA, 1170 bp, synthetic construct
  misc_feature 1..1170: note = source = /note="Description of Artificial Sequence: Synthetic coding sequence"
  source 1..1170: mol_type = other DNA
atgcctcccagtggactccggctgcttcctctcctgctgcctttgctctggttgctggtgcttacgcccgggagacccgctgccggactttctacctgcaagactatcgatatggagctggtgaaaagaaagcgcatcgaggccatccgaggacagatcctgagcaagctcaggttggcctcacctccaagccagggtgaagtgcccccaggcccactccccgaagcagtgctggctttgtataacagcacacgggatcgcgttgcaggcgagtctgcagagccagaacccgaaccggaggcagattactacgcaaaagaggtgacaagagtcctgatggtcgagactcataacgagatctacgataaattcaaacaaagcacccacagtatctatatgtttttcaacacaagcgagctccgcgaagccgtgcccgaacctgtcctgctcagcagagctgagctgcgacttctgcgactcaagctgaaggtcgagcagcacgttgaactctaccagaaatacagtaataacagctggcgctacctcagcaacaggctgttggctcctagcgactcccccgagtggcttagctttgatgtcaccggagtggtccggcagtggctttctcgaggtggagagattgagggcttccgcctgagcgcacactgcagctgcgatagccgcgacaacacacttcaggtggatatcaacggttttaccaccggaaggcggggggatctggcaacaattcatggcatgaatcgccccttcctcttgctcatggcaacccccctggagcgggcccagcatctgcaaagctcccggcaccggcgggccctggatactaattattgcttctcttcaactgagaaaaattgctgtgtgcgccaactctacattgatttccggaaggaccttgggtggaagtggattcacgagcctaaagggtaccacgccaatttttgcctgggcccctgcccttacatttggagtctggatacacagtattccaaagtgttggctctgtataatcagcacaatcccggtgcctcagctgcgccctgttgtgttccacaggccctcgaaccactgcctatcgtatactacgtggggcggaaacccaaggtggaacagctgtctaacatgatagtcaggagctgtaagtgctcc

SEQ ID NO: 20064 - DNA, 1170 bp, synthetic construct
  misc_feature 1..1170: note = source = /note="Description of Artificial Sequence: Synthetic coding sequence"
  source 1..1170: mol_type = other DNA
atgccgccgtcgggcctgcggctcttgccactgctcctcccgctgctctggctcctcgtgctcaccccggggcgtccagctgcaggactctcaacctgtaagactatcgatatggagctggttaagcgcaaacgcatcgaagccattcgcggccaaatcctctccaagctgcggctggcgagcccgccatcgcaaggagaagtgcctccgggaccgctgccagaagcagtcctggccctgtacaactcaactcgcgaccgcgtggcgggcgagtccgccgagccagagcccgaaccggaagctgactactacgcgaaggaggtgaccagagtcctgatggtggaaacccacaacgagatctatgacaagttcaagcaatcgacgcactcgatctacatgtttttcaacacctccgaattgcgagaagccgtcccagagcccgttctcctgagccgggcagagctgcggcttctgagactgaaactgaaggtcgagcagcatgtggaactctatcagaaatactccaataactcctggagatacctgtcgaaccggctcctcgcacctagcgattcccctgaatggctgtctttcgacgtcacgggcgtggtccgccagtggttgtcccgcggaggagaaatcgaaggattccgcctgtcagcccattgtagctgtgactcgcgcgacaacaccctccaggtagacattaatggattcactactggacgccgcggcgacctggccactatccatggcatgaacagaccgttcctgctgttgatggcaactccactggaaagagcccagcacctgcagtcgagccggcaccggcgcgccctggatactaattactgcttctcgtcgaccgagaaaaactgttgcgtccgccaactgtacatcgatttccggaaggatctgggttggaaatggatccacgagccaaaaggctatcatgccaacttttgtctgggaccatgtccttacatctggtccttggacacccaatactcgaaggtgctggcgctctacaaccagcataatccaggcgccagcgccgccccctgctgcgtcccccaggccctcgaaccacttcctatcgtctattacgtcgggcggaagcctaaggtggagcaactgagtaatatgatcgtcagaagctgcaagtgttcg

SEQ ID NO: 20065 - DNA, 1170 bp, synthetic construct
  misc_feature 1..1170: note = source = /note="Description of Artificial Sequence: Synthetic coding sequence"
  source 1..1170: mol_type = other DNA
atgccaccatccggtctcaggctcctcccccttctgcttccactgctgtggctactggtccttacaccaggtcgacccgcggcaggcctgtcgacatgcaagactatcgatatggagttggttaagaggaagagaattgaggctattagaggacagattctttctaagttgaggctcgcctcacctccctcccagggggaagtgccgcccgggcctcttcccgaggccgtgctcgccttgtacaacagtaccagagatcgggtggctggcgaatccgccgagcccgagcctgagccggaggccgactattacgctaaagaagtcacccgagttctcatggtcgaaactcataatgaaatatatgacaagttcaagcaatcaactcattcaatctacatgttcttcaatacgtctgagctgcgggaggccgtgcctgaaccagtgctgttgtcccgtgccgaactgcgcctgctcaggcttaaacttaaggtcgagcagcatgtggaactgtaccagaagtattcgaacaattcctggcggtatctgtcaaatcgtttgctggccccgtcagactctcccgagtggctgtcatttgatgtgactggtgtggtgcgacaatggttgtctaggggcggggagattgaaggcttcagactcagcgcccactgttcctgtgacagtagggacaacaccctccaagttgacataaatggattcactacaggacgccgtggggacttagcaactatccacggcatgaaccgaccttttctgttgctgatggctactcccctggaacgagctcagcatttacaatcctctagacaccgccgcgccctggacactaattactgtttcagcagtactgaaaagaattgttgcgtgcggcaactctacatcgactttcgcaaggacctagggtggaagtggatccacgagccgaaagggtaccacgctaatttctgcctcggcccatgtccttacatttggtccctggatacgcagtattcaaaggtactcgccctgtataatcagcataaccctggggcctcagccgccccttgctgtgtgccccaggccctggagccacttccgatcgtttattacgttggccggaagccaaaggtggaacagctctcaaacatgatcgtgcgatcttgtaaatgttcc

SEQ ID NO: 20066 - DNA, 1170 bp, synthetic construct
  misc_feature 1..1170: note = source = /note="Description of Artificial Sequence: Synthetic coding sequence"
  source 1..1170: mol_type = other DNA
atgccacccagtggcctgcgtttgctgccgctccttctccctctgctctggctcctggttctgaccccaggcagacccgccgctggcctgtctacttgcaagacaattgacatggaactcgttaagaggaaacgtattgaggccattcgtggacagattctatcaaaactccgtctggcctcccccccgagtcagggggaggtaccaccgggaccactgccagaagctgttctcgccctctataatagtaccagggatcgtgtagccggagagtccgcagagcctgagcccgaacccgaggccgattactacgcgaaagaagtgacacgggtgctaatggtcgaaactcacaacgagatatacgataagtttaagcaatctacacacagcatttatatgttcttcaatacctcagagctgagagaggccgtacctgaaccagtgcttctgagcagggcggagctgaggttgctgcgcctgaaactcaaagtcgagcagcatgttgagctctaccagaagtactccaataactcttggcggtatttgtctaatagacttttggcacctagcgactctccggagtggctatcatttgacgtgacaggcgtggtgagacagtggctaagccgcggcggggaaatcgagggatttaggctatcagcccactgcagttgcgactcacgcgacaatactctgcaggtggacataaacgggtttaccaccggaaggcgcggcgatttagcaactattcacggcatgaaccggcctttcctcctgctgatggctacccctctcgaacgcgctcagcatcttcaatcgagcaggcaccgccgagcactcgatacaaattattgtttctcctctacagaaaaaaattgttgtgtccggcagctatacatagatttccggaaggatctggggtggaagtggattcacgagccaaaaggctaccatgccaatttttgtctagggccttgcccttatatatggtccctcgacacccagtattccaaagtgttggccctctataatcagcataacccaggtgccagcgccgcgccctgttgtgtcccgcaggctctcgaacctcttcccattgtgtactacgtgggcaggaagccgaaagtagagcagctttcaaacatgatagtgcgatcctgtaaatgctcc

SEQ ID NO: 20067 - DNA, 1170 bp, synthetic construct
  misc_feature 1..1170: note = source = /note="Description of Artificial Sequence: Synthetic coding sequence"
  source 1..1170: mol_type = other DNA
atgccgccatctggcctgagactccttcctctgctcttgccgttgctgtggctgttggtgctgacccctgggcgacccgccgctggcctctccacatgcaagaccattgacatggagctcgttaagagaaagaggatcgaggccattcgtggccaaatactctcaaaattgagactggcgtcaccccctagtcagggtgaagtgccccctggccccctacctgaggccgtgctggctctgtacaatagcaccagagaccgcgtggccggcgagagtgctgagcccgaacccgaaccggaagctgactactacgccaaagaggtaacgcgtgttctgatggtggaaacccataacgaaatctatgacaaatttaaacagtccacccacagcatttacatgtttttcaacacgtcagaacttcgggaggccgtgccagagcctgttctgctgagtcgcgcggagcttcgattgctcagactcaagctcaaagtcgagcagcatgtggagctgtaccagaagtacagcaacaatagttggcggtacctctccaatcgattgctggccccaagcgactctcctgaatggctcagttttgacgtgactggtgtggtgcgccagtggctgagtcgcggcggcgagattgagggattccgattaagcgctcattgttcgtgcgatagccgagacaatactctgcaagtggacatcaacggttttactactgggcgcagaggagatttggctaccattcacggtatgaatcgcccgttcctactgctcatggccaccccgttggagcgtgcgcagcatctgcagagttcacgccatcgaagagccctggacacaaactactgcttctccagtaccgagaaaaactgctgcgttcgtcaactgtatatagattttagaaaggatctgggctggaagtggatccatgaacctaagggatatcacgccaacttctgtctgggcccatgcccttacatctggagtctggacacccagtacagcaaagtgctcgcgctttacaatcagcacaatcccggcgcctctgctgccccatgctgtgtgccccaggcgctggagcctctccccattgtctattatgtcgggaggaagccaaaggtggagcagttgagtaatatgatcgtcagaagttgcaagtgctcc

SEQ ID NO: 20068 - DNA, 1170 bp, synthetic construct
  misc_feature 1..1170: note = source = /note="Description of Artificial Sequence: Synthetic coding sequence"
  source 1..1170: mol_type = other DNA
atgcccccttccgggctcagactgctgcctctgcttttgcctcttctgtggcttctggtccttaccccaggcagacctgcagcgggactttcgacttgtaagaccatagatatggagctggtgaaacgcaagagaatcgaagcaatcaggggtcaaattctgagcaaacttcgtcttgcatcgccccctagccagggcgaagttcctcctggacctctccccgaagccgtgctggccctgtacaattcgaccagagatcgcgtcgccggcgagtcggcagaaccagagcctgaacctgaagcggactattacgcaaaagaggtgactagagtcctcatggtggaaacccacaatgagatctacgacaagtttaagcaaagcactcactcaatttacatgttctttaacaccagcgaacttcgggaagcagtgccagaaccagtgctgctgtcccgcgcagaacttcggttgcttcggctcaagctcaaggtggaacagcatgtggaattgtaccagaagtactccaacaatagctggcgatatctgtccaatcggctgctggcaccgtcggactcgccagaatggctgtccttcgatgtgactggtgtcgtccggcaatggttgtccagaggtggcgaaatcgagggttttcgactctcagcacattgctcctgtgattcccgcgacaacactcttcaagtggatatcaacggctttaccaccggacgacgaggtgatctggccactattcatgggatgaacaggccttttctgcttctgatggcaactccgctggagcgtgcacagcatcttcagagctccagacatagacgcgctctggatactaactactgtttttcaagcaccgaaaagaactgttgtgtgagacaattgtacattgattttcgcaaagatctcggctggaagtggattcacgaacccaagggataccatgcaaacttttgccttggtccttgtccctacatctggagcctcgatacccagtactccaaggtcctcgccctgtacaaccagcacaatcctggcgcttccgcagcaccttgctgcgtcccacaagcacttgaaccgcttccaattgtgtactatgtggggagaaagcctaaagtggaacagctgagcaatatgatagtgcgcagctgtaagtgttcg

SEQ ID NO: 20069 - DNA, 1170 bp, synthetic construct
  misc_feature 1..1170: note = source = /note="Description of Artificial Sequence: Synthetic coding sequence"
  source 1..1170: mol_type = other DNA
atgcctccatccggactgcgcttgctgccactcctgctgcctctcctttggctgcttgtgcttacccctggtcggccagcggccggcctttcgacttgcaagaccatagatatggaactcgtgaagcgtaagcgtattgaagcgatcagaggtcaaattctttccaaactgcgcctcgcaagccccccatcccagggcgaggtgccccctgggccacttccagaagcggtcctggccctgtataactcgacccgggatagggtcgcaggagaaagcgccgagcctgaaccggaacctgaagccgattactacgcaaaagaagtcacccgtgttctcatggtggaaacccataacgagatatatgacaaattcaagcagtcaactcattccatttacatgttctttaacacctcggaactcagagaggcagtgcccgagcctgtgcttctgtcgcgcgctgagctgcgcctcctgcggctgaaactcaaggtggaacagcatgttgaactctaccaaaagtactcgaacaatagctggagatacctttcgaaccgacttctggcaccctcggatagccccgagtggctttcctttgatgtgactggcgtggtgagacaatggctgtcccgaggcggtgaaatagaaggatttcggctgagcgcccactgcagctgcgactcaagagataatacccttcaagttgacattaacggctttactactggtcgaagaggagatctggcaactattcatgggatgaatagaccttttctgcttcttatggcaactcccctggagcgcgcacagcatctgcaaagctcacggcatagacgggctcttgacaccaattactgttttagctcaactgagaagaactgctgtgtgcgtcagctttacattgatttccgtaaggatcttggttggaagtggattcatgagcctaaaggataccacgcaaatttctgtctcgggccatgtccgtacatctggtcgctggatacgcaatattcaaaagtgctcgctctttacaatcaacataaccccggagcatccgccgcaccatgttgtgtgccccaggctttggaaccactgccaatagtttactacgtgggtcgaaagcccaaggttgaacagctgtctaacatgatcgtcagatcgtgtaagtgttca

SEQ ID NO: 20070 - DNA, 1170 bp, synthetic construct
  misc_feature 1..1170: note = source = /note="Description of Artificial Sequence: Synthetic coding sequence"
  source 1..1170: mol_type = other DNA
atgccaccttcgggcctgcggctccttcctctgctgctccctctgctgtggctgctcgtgctgacgcccggacgtcctgcagcaggtctgtctacctgtaaaaccattgacatggaacttgtgaaaagaaagcgcatcgaggctatccgtgggcagattctgtccaagctgagattggcatcgccacccagccagggtgaggtgcctccaggcccactgccagaagcagtccttgcactttacaactcgacgcgcgatagagtggccggagaatcagcagaacctgagccagagccagaggctgactattatgcgaaggaggttaccagagtgctgatggtggaaactcacaacgaaatctacgacaagtttaagcaatcgactcactcgatctacatgttcttcaataccagcgaactgagggaggcagtgccggaacccgtgctcctgtctcgcgcagaactgcgcctgctgcgacttaagctgaaggtggagcaacacgtggaactgtaccaaaagtactcgaacaacagctggcgctacctgtctaacagacttttggccccatccgacagcccggaatggctttccttcgatgtcactggagtcgtgaggcagtggttgtcacggggaggcgagatcgaaggttttaggttgagcgcccattgctcctgcgattcgcgggacaacactcttcaagtcgacataaacggtttcactactggtcgcaggggcgaccttgcgactatacacgggatgaaccgtccgttccttctgcttatggcgacccctctggaaagagcgcaacatcttcagtcatcccggcacagacgcgcactcgacaccaactactgtttttccagcactgaaaagaactgttgcgtcaggcaactttacattgatttcaggaaggatcttggatggaaatggatccatgagcctaagggctaccacgcaaacttttgtttggggccatgcccgtatatctggtcgctggacacccagtactcgaaggtccttgccctgtataatcagcataatcctggggcgtccgccgccccgtgttgtgtgccacaagcccttgagcccctgcccatcgtgtactacgtgggtcgcaagcctaaagtggaacaactgtcaaacatgattgtcagatcctgtaagtgtagc

SEQ ID NO: 20071 - DNA, 1170 bp, synthetic construct
  misc_feature 1..1170: note = source = /note="Description of Artificial Sequence: Synthetic coding sequence"
  source 1..1170: mol_type = other DNA
atgccgccgtcgggcctgcggctgcttcctctgctgctgccgctgttgtggctgctggtcctgacccccgggaggcccgcggccggactgtcgacgtgtaagacgatcgatatggagctggtgaaacgcaagcggatcgaggctatcaggggccagatcctttcgaaattgagacttgcctcgccgccgtcacagggcgaagtgccccctgggccgctgccggaggcagtgctggccctctacaactcgaccagggaccgggtcgccggcgagtcagcagagccggagccggaaccggaagccgactactacgccaaggaggtgaccagagtgctgatggtggagactcacaatgagatctacgataagtttaagcagtccactcattcaatctacatgtttttcaacacttccgagttgcgggaggctgtcccagaaccggtgctgctgagcagagctgaattgagactgttgcgcttgaaactgaaggtagaacaacacgtggaactgtaccagaagtattcaaacaattcatggcgatatctgtccaatcggctgctcgctccatcggattcgccagagtggctcagcttcgacgtgactggagtcgttcgccagtggctgtcgcggggcggtgaaatcgaaggtttcaggttgtccgctcactgttcgtgcgactcgcgggataataccctccaggtcgacatcaacgggttcactaccggacgccgcggggacctggctactattcacggcatgaaccgtcccttcctccttcttatggctactcccctggaaagggcccagcacctgcagagcagcagacatagacgcgccctcgataccaactactgtttttccagcaccgagaaaaactgctgtgtgagacagctgtacattgattttagaaaggatctcggctggaagtggatccacgagccaaaggggtatcatgcaaacttctgcctgggaccgtgtccatacatttggagcctcgacacccagtactcgaaggtcctggccttgtacaaccagcataatccgggagcttccgcggccccatgctgcgtgccgcaggcgctggaacctctgcctatcgtctactacgtgggacggaaaccgaaggtggaacagctgtcgaacatgatcgttcgctcctgtaagtgctcc

SEQ ID NO: 20072 - DNA, 1170 bp, synthetic construct
  misc_feature 1..1170: note = source = /note="Description of Artificial Sequence: Synthetic coding sequence"
  source 1..1170: mol_type = other DNA
atgcctccttcaggactgcggttgttgccactgcttcttccactgctttggcttcttgtgctcacgcctggcaggcctgcagccggcctcagcacttgtaagactattgatatggaactcgtgaaacgcaagcgcattgaagcaatccggggtcaaatcctcagcaaactccgccttgcctccccaccatcccaaggagaggtgcctcctggacctcttcctgaagctgtgttggccctttacaactccacccgggatagagtggcaggtgaaagcgctgagccagaacctgaaccagaggcagattactatgctaaggaggttacgcgggtgcttatggtcgaaacccataatgaaatctatgataagttcaagcaaagtacccatagcatatacatgttctttaacacgtccgagcttagagaagccgtccccgaaccggtgctgctttcccgagcagaactcaggctcctccggctgaaacttaaggtggagcagcacgtcgaattgtaccaaaagtactcgaacaattcctggcggtacctttcgaatcggctcctggcaccatctgattccccagagtggctttccttcgacgtgactggcgtcgtcagacagtggctcagcagaggtggggaaattgaagggtttcgactctcagcacactgttcctgcgattcgagggacaatactctgcaagtcgacattaacgggtttacgactggtcgaagaggtgatttggcaactattcatggcatgaaccggccattcctgttgcttatggcaaccccactcgaaagagcccaacacctgcaatcctcgcgtcatagaagggcccttgataccaactactgcttctcgagtactgagaagaactgctgtgtgagacagctgtacattgattttagaaaggatctcggatggaagtggattcacgagcccaagggctaccatgccaacttttgtctcgggccttgtccttacatttggtcccttgacacccaatattccaaggtcctggccctctataaccagcataacccgggtgcgtcagcagcgccatgctgtgtgcctcaagcactcgaacctctgcctatcgtctactacgtcgggcgaaaacccaaggtggaacagttgtcgaacatgattgtgagatcctgcaaatgttcg

SEQ ID NO: 20073 - DNA, 1170 bp, synthetic construct
  misc_feature 1..1170: note = source = /note="Description of Artificial Sequence: Synthetic coding sequence"
  source 1..1170: mol_type = other DNA
atgcccccttcgggcctccgcttgctgccactgctgttgccgcttctgtggcttctggtgttgactccggggaggccagccgctggcctcagcacttgcaagaccatcgacatggagctggtcaagcgaaagcggatcgaagccatccgcggacagattctttctaaactgcggttggcttccccacccagccaaggcgaggtgccgccgggcccgctgccggaagccgtcctcgccctttacaactccacccgagatcgagtcgcgggagaatcggccgaacccgaacctgaacctgaggccgactactacgcaaaggaggtgacgcgggtgctcatggtggagactcacaacgaaatctacgataagtttaagcagtcgacccattcaatctacatgtttttcaacacctccgagttgcgtgaagcggtccctgaaccagtgctgctctcccgtgcagagctgagactgctcaggctcaaactcaaagtcgaacagcatgttgaattgtaccagaaatactcgaacaactcctggcgctacctctcaaaccgccttctggcaccgtccgactccccagaatggctgtctttcgatgtcactggtgtggtgagacaatggctttcaaggggaggagaaatcgagggatttcgcctcagcgctcactgttcttgcgattcaagggacaacaccttgcaagtcgacatcaacgggttcaccacgggccggcggggagatctggcgactattcacggtatgaatcggccgttcctgctgctcatggcaactcccctcgaacgggcccaacacctgcagtcgtctcgtcaccgcagagcgctggacactaattactgcttctcatcaaccgagaagaactgctgcgtgcgccaactgtatatagacttccgcaaggacctgggatggaagtggatccatgagccaaagggttaccacgctaatttctgtcttggaccctgtccgtatatctggtcgctggacacccagtacagcaaagtgctcgccctgtacaatcagcataatcctggagcgtccgcggcaccttgctgtgtgccacaggcattggagcctctgccaatcgtttactacgtggggagaaagccgaaagtggaacagttgagcaacatgatcgtccgctcgtgcaagtgcagc

SEQ ID NO: 20074 - DNA, 1170 bp, synthetic construct
  misc_feature 1..1170: note = source = /note="Description of Artificial Sequence: Synthetic coding sequence"
  source 1..1170: mol_type = other DNA
atgcccccgagcggacttcgcctgctgcctctgctgcttcctctgctctggttgctcgtccttaccccaggtagacctgcagccggtctttccacttgcaagactatcgatatggaactcgtgaagagaaagcgcattgaggccattagaggccaaattctctccaagttgcggcttgctagcccgccatcccaaggtgaggttccgccgggcccactgcccgaggcagtgcttgccctctataactcgacgcgcgatagggtcgctggagagtccgcggagcctgaaccggaacctgaggcggactattacgccaaggaggtgacccgagtgcttatggtggagactcacaatgaaatctatgataagtttaagcaaagcactcattcgatttacatgttctttaacacctcggaactccgggaagccgtgcctgaaccagtcctgctttcgagagccgagttgagactgctgcgcctgaaacttaaagtggaacaacatgtggaactgtaccagaagtacagcaacaactcctggcggtacctttccaatagactgcttgccccatccgacagccccgaatggctctcattcgatgtgaccggagttgtcagacagtggctgtcccggggaggagaaattgagggatttcggctgtccgcgcattgttcttgtgattcaagggataacaccctgcaggtggacattaacggttttacgaccgggagacgtggagatctcgcaactatccacgggatgaaccgcccttttctcctgctcatggccacccctctggaaagggcacagcacctccagagctcccggcacagacgggcactcgataccaattactgtttttcatccacggagaaaaactgctgcgtgaggcagttgtacatcgacttccggaaagatctcggatggaagtggattcatgagcctaagggctaccatgcaaacttttgcctgggaccatgcccatacatctggtcgcttgacactcaatatagcaaggtcctggcactgtataaccagcacaatccaggagcgtccgccgcaccctgttgtgtccctcaggccctggaacctctgcctattgtgtactacgtcggacgaaagccgaaagtggagcaactgtcaaatatgattgtgcgttcttgtaagtgtagc

SEQ ID NO: 20075 - DNA, 1170 bp, synthetic construct
  misc_feature 1..1170: note = source = /note="Description of Artificial Sequence: Synthetic coding sequence"
  source 1..1170: mol_type = other DNA
atgcctcccagtgggttaaggcttttgcccctcctgctgccactcctgtggctgctggtgctcacacctggacggccggccgccggcctgtccacctgcaagacaatcgacatggaactggtcaagaggaaaaggatcgaagcgattcgaggccaaatcctcagcaaactgagactggcatcaccaccttctcagggagaagttcctcccgggcccctgcctgaagcagtgttagccctatacaactcaacgagggatcgtgtggccggcgaatcagccgagcctgagcccgagccagaagcggattactatgcaaaggaagtgacacgagtactgatggtggaaacacacaacgaaatctacgataagtttaaacaatcaacgcattcaatctacatgtttttcaacacgtccgagctgagagaggccgtgcctgaacccgtactgctctcccgtgcagagttgcggctgctgcggctaaagctgaaagttgaacagcacgttgagctgtatcagaagtacagcaataacagctggcggtatctaagcaataggctcctagcaccttccgacagccctgagtggctatcatttgacgttacgggagtagttcgccagtggctgagtagggggggcgagatcgaggggttccggctctcggctcactgctcatgtgattcgagagacaacaccctgcaggtggacattaatggatttacaaccgggcgtcgcggagatttggccacaatccatggcatgaatcggccttttctgctcctgatggccacccccctggagcgagcacagcatctgcagtctagtagacacagaagggccctcgatactaattactgtttctctagtacagagaagaactgctgcgttcgtcagctgtacattgactttcgcaaggatctggggtggaaatggatccacgaacccaaaggctaccacgccaatttttgcttaggaccatgcccttacatctggagcctggatacgcagtactctaaggtgctcgccctttacaaccaacacaatccaggagccagcgctgcaccttgttgtgtgccacaagcgctggagccactcccgattgtgtattatgttgggagaaaaccgaaggtcgagcaactgagcaatatgatcgtccgatcttgcaaatgctcc

SEQ ID NO: 20076 - DNA, 1170 bp, synthetic construct
  misc_feature 1..1170: note = source = /note="Description of Artificial Sequence: Synthetic coding sequence"
  source 1..1170: mol_type = other DNA
atgcctccaagcggactccggctgttgcccctgctgttgccgctgctgtggctgctggtccttacccctggtcgcccagccgcaggcctgtcaacttgtaagaccatagacatggaactggtgaaaagaaagcgtattgaggcaataagaggccagattctctccaagctgaggcttgcatcgcctccgagccaaggagaagtgccccctggacccctgcctgaagccgtgctggcactgtacaactctacccgtgatagagtggcaggggagtcagcagaaccagagccagagcccgaagcggattactatgcaaaggaggtgaccagagttcttatggtcgaaactcataacgaaatctacgataagtttaagcagtcaacccatagcatttacatgttctttaacacttcagaactcagagaagcagtgccagagccggtgcttctctcgagggcagagcttaggctcctccgtctcaaactcaaggtggaacagcacgtcgaactctaccagaagtactcgaacaacagctggagatacctctccaatagacttcttgcaccttccgattcgccggaatggctgagctttgatgtaactggggtggtaaggcaatggctgtcacggggaggagaaatagagggatttcgcctctccgcccattgttcgtgcgacagcagagacaatacccttcaggtcgacattaacggattcactactgggagaaggggagatcttgcaaccatccacggtatgaaccggccatttcttcttctcatggccactccactcgaaagagctcagcacctccaatcctccagacatcgccgggcgctcgatacgaactactgctttagttcgaccgaaaagaactgttgcgtgcgccagctgtacatcgacttccggaaagatctgggctggaagtggattcacgagcctaaagggtaccatgcgaatttctgtcttggtccatgcccttacatttggagcctggacacccagtactcgaaggtgctcgccctgtacaaccagcataacccgggtgccagcgcagcgccatgttgtgtccctcaagcacttgaacctctgcctattgtctactacgtcggccggaaacctaaggtggaacaactttccaacatgattgtcagatcctgcaagtgttcc

SEQ ID NO: 20077 - DNA, 1170 bp, synthetic construct
  misc_feature 1..1170: note = source = /note="Description of Artificial Sequence: Synthetic coding sequence"
  source 1..1170: mol_type = other DNA
atgccacccagtggcctccgactccttccgttgttgctcccactgttatggctcttagtgttaacaccaggtcggccggcggctggactgtccacctgcaagaccatcgatatggagctcgtgaaacgcaaacggatcgaagctattcgcggtcaaatcctgtcaaagttgcggcttgccagtccccctagccagggggaggtcccacctggtccactgccagaggcagttctcgctttgtataattctacacgggatcgggttgcaggggaatctgccgagccagagccggagccggaagccgactattacgcaaaggaggtgacccgagtgttgatggtggaaactcacaacgaaatatacgataagttcaaacaatctacccatagtatctatatgttttttaacacctctgaacttcgggaagccgtccccgagcctgtgctgctgtcgagagccgaactgcgtctgctcagactgaaactgaaggtggaacagcatgttgagttataccaaaaatatagtaacaactcttggcgctatttatcaaatagactcctggccccatcagactcaccagaatggctgagcttcgacgttactggcgtggtgaggcaatggctctcacgcggtggagagattgaagggtttcggctaagcgcccattgcagttgcgatagccgcgacaatacgctccaggtggacatcaacgggttcaccaccggacgcagaggggatctggccacaatccatggtatgaaccgcccatttctactcctgatggccacgccgttggaaagagcccaacacttgcagtccagtcgacatcgtcgagccctggacactaattattgtttttcttcgaccgaaaagaactgctgcgtccggcaactttacatagatttcaggaaagacctcggatggaaatggatccacgagcccaaaggatatcacgcgaatttctgcttagggccctgcccctatatatggtctttagatacccaatattccaaggtgctcgcactctacaatcaacataacccaggggcttcagctgcgccttgttgcgttccccaggccctggaacccctgccgattgtgtactacgtgggcagaaagccaaaggttgaacagctctctaacatgatcgtgcgctcttgcaaatgttcg

SEQ ID NO: 20078 - DNA, 1170 bp, synthetic construct
  misc_feature 1..1170: note = source = /note="Description of Artificial Sequence: Synthetic coding sequence"
  source 1..1170: mol_type = other DNA
atgcccccgtcgggactgcgactgttgcccttgcttctgccgctgctgtggttgcttgtcctgacccccggtcggcctgcggccggcctgagtacctgcaagacaatcgatatggagctagtgaagcgtaaacggatcgaggccatccgtggccagatccttagtaagctgcgactggcgagtccaccgtctcagggcgaggtcccccccggacctttgccagaggcggtgctggcattgtacaacagcactagagacagagtcgctggagagtcggccgagccggaaccagagccggaggcagattactacgcgaaggaagtgactcgggtgctcatggttgaaacgcacaatgaaatctacgacaaattcaaacagtcgacgcacagcatctacatgttcttcaacacatccgaattgagggaagccgtacccgaaccggtgctgttgagccgagcggagttgcgtctgctgcgtctgaagctgaaggtggagcaacatgtagagctgtaccagaagtattcgaataactcgtggaggtatctaagtaatcggctgctggcaccctcggattcccctgagtggctgtccttcgacgtgacaggagtcgtgcggcaatggctctcgcgaggcggtgagatcgaaggttttagactctccgcccactgcagctgtgattcgcgcgataatactttgcaagtggatattaacggctttacgacaggcagacgaggtgatctggccacgattcatggaatgaatagacccttcctgttgctgatggcaacgccgctggaaagagcgcaacacctccagtccagcagacaccgacgcgcgctcgacaccaactactgtttctcttctaccgagaagaactgctgcgttcgtcagctttacatcgacttcagaaaggacctaggctggaaatggattcatgaacctaagggctaccatgctaatttttgcctaggaccatgcccttacatctggtcactagatactcagtactcgaaggtgttggcattgtacaatcaacacaatcccggagcgagcgccgcaccgtgctgcgtcccccaagcgctggagccattacccatcgtgtactatgtgggccgcaaaccgaaagtggagcaactgagcaatatgatagtacgctcctgcaagtgctcg

SEQ ID NO: 20079 - DNA, 1170 bp, synthetic construct
  misc_feature 1..1170: note = source = /note="Description of Artificial Sequence: Synthetic coding sequence"
  source 1..1170: mol_type = other DNA
atgcctcctagcggactgcgcttacttccattacttctgcctctactgtggctgttagtgttaaccccaggtcgccctgccgccggccttagcacttgcaaaacgatcgacatggaattggttaagagaaagaggattgaggctatcagaggacaaatcctttcaaaattacgactggcatctcctccgagccaaggagaagtcccgcctggtcctctaccggaagctgttttggcactttataattctactagagatcgagttgcaggcgaatccgcagaacctgaaccggagccggaggctgattattatgctaaagaggttaccagggttttgatggttgaaacgcataacgaaatttacgacaagtttaaacagagcacccactcgatatatatgttcttcaatactagcgagctgagagaagctgtgccggaaccggtattactttctcgcgcagaactgcggctactgagattaaaacttaaggttgagcaacacgtagaattgtaccagaaatactcaaacaacagctggaggtacttgtccaacagacttttagctccgagcgactctccggaatggctttcattcgatgtcacaggagtagtgcgtcagtggttgtcccgcggcggagagattgaagggttcagactttctgctcattgcagctgtgactcacgtgataacaccctacaagtcgatatcaacggatttaccacaggacgccgcggtgatcttgcaacaattcacggaatgaacagaccctttttgctacttatggccacacctctggaacgcgctcaacacctccaatcatctagacatcgcagagcgttagacacaaattattgcttcagctctaccgaaaaaaactgttgcgttcgtcagctctacatcgattttcgtaaagatcttggctggaaatggattcatgaaccgaaaggatatcatgctaacttctgcttaggcccttgcccgtacatatggtcattggatactcagtactctaaagtccttgccctgtacaatcagcataaccctggtgcttctgccgcgccctgctgcgttcctcaggctctcgaaccactgcccatcgtctattatgtaggtcgcaaaccgaaggtcgagcaactcagcaatatgattgtccgctcatgtaagtgttct

SEQ ID NO: 20080 - DNA, 1170 bp, synthetic construct
  misc_feature 1..1170: note = source = /note="Description of Artificial Sequence: Synthetic coding sequence"
  source 1..1170: mol_type = other DNA
atgcctccatccgggctgcggctgctgcctcttctcctaccattgttatggctcttggtgctgacaccgggacgccctgcagcaggtctgtccacatgtaagaccatagatatggagctggtaaagcggaaaaggattgaggctattaggggtcagatcttgtccaaactgcggttagcctctcccccttcgcagggagaggtcccacctggaccactgcctgaagcagttctggccctctacaattcgaccagagaccgggtcgcaggagagtccgccgaaccagagcctgaaccagaagcagactactatgccaaggaagtcaccagagtgctgatggtggagactcataatgagatctatgacaagttcaaacagtctacccacagcatctacatgttttttaatacaagcgagttgcgggaggccgttcctgagcccgtgctcctctctcgagctgaactacggctgttgaggctcaagctcaaggtcgagcaacacgtcgagctctatcagaagtacagtaataattcctggcgctacctcagtaatcgattactcgcaccaagtgactcccctgagtggcttagcttcgacgtgaccggggtggtgcgtcaatggttgagtagggggggagaaattgaaggattcaggctcagcgcccactgcagctgtgattccagagacaatactctgcaagtggacatcaacggctttaccaccggcaggagaggggatcttgccacaattcacgggatgaacaggcccttcctacttcttatggctactccattggagagggcccagcatttgcagagctcgaggcacaggcgagctcttgacacaaattactgttttagctccacagagaagaactgctgcgtgcgccagctttatattgatttcagaaaggatctcgggtggaagtggattcacgagcctaaagggtatcacgctaatttctgtttaggaccctgtccatacatctggtctctggatacccagtacagcaaagtgttggcgttgtacaatcaacataacccaggagcttcggcagcgccatgctgcgtgccacaggctctggagcctctccctattgtctactatgttgggaggaaaccgaaggtggagcagctgtctaatatgatagtgcggtcctgcaagtgttca

SEQ ID NO: 20081 - DNA, 1170 bp, synthetic construct
  misc_feature 1..1170: note = source = /note="Description of Artificial Sequence: Synthetic coding sequence"
  source 1..1170: mol_type = other DNA
atgccaccaagcgggctgcggttactgccccttttactacccctactgtggttgcttgtcctgacccccggcaggcccgcagctggcctctccacatgcaaaacaatagatatggagctcgtaaaaagaaagcgtatcgaagcaatccgaggtcaaattttgtcaaaactgcggttggcctcccctccgagccagggcgaagtgccgcctggaccactgccagaagcggtcctggctttgtataattcaacccgcgaccgggtggctggagaaagtgctgagccagagccggaacctgaggcggactattacgccaaagaagttactagagttctgatggtggagacccacaacgaaatctacgacaaatttaagcaaagcactcacagtatatatatgttctttaatacaagtgagctgcgggaagccgtacctgaaccagtgctcctctccagagccgaactcaggcttctccggctcaaacttaaggtagaacagcacgtcgagctatatcaaaaatactccaataatagttggcgatacctgagtaaccgcctgcttgctccctcagattcccccgagtggttgtccttcgacgtcaccggagtggtgcgccagtggcttagccgggggggagaaattgaaggcttcagactgagcgcccactgcagctgcgatagccgcgataatacactgcaggtagatatcaacggctttactactgggcgaagaggggacttggccaccatccacggaatgaaccggccttttttactcttaatggctacaccactagagcgagctcagcaccttcaatcatcaaggcaccggcgggcgctcgatactaactactgtttctcgagcacggagaagaactgctgcgttagacagctgtacatcgactttcgaaaggatttgggttggaagtggatacatgaaccaaaaggctatcatgctaacttttgtctgggcccttgtccttacatttggtctctggacactcagtatagcaaagtgttagcactatacaaccaacacaacccgggggcttctgccgcaccttgttgcgtgccccaagcgctggagcctctccccatcgtgtactatgtcgggcgtaagccaaaagtggagcaattgtccaatatgatcgttcgaagttgcaaatgtagt

SEQ ID NO: 20082 - DNA, 1170 bp, synthetic construct
  misc_feature 1..1170: note = source = /note="Description of Artificial Sequence: Synthetic coding sequence"
  source 1..1170: mol_type = other DNA
atgccaccaagtgggctacgcctactgccactcctcctcccactgctttggctgctggtactgacgccaggaaggcctgccgcaggtctgtccacttgtaaaaccatcgacatggagctggttaagcgcaaacgaatcgaggctattcgagggcagatactgtcaaaactgcggctggcttccccaccatcccagggtgaggttccccctgggccgctaccagaggccgtactggccctttataattcgactagagatcgcgtggctggagagagcgccgaaccagaaccggagcccgaggctgactactacgctaaggaagtgacccgcgtgttgatggtcgaaacccacaacgagatttacgataagtttaagcagtctacccacagcatatacatgttcttcaatacgagcgagctccgggaagcagtccctgaaccggtgctactctctcgggcggagttgaggctcctgcggctcaagctcaaggtggaacagcacgtcgaactttatcagaagtactcaaacaattcctggaggtacttgagtaaccgactcctcgcccctagtgattcccccgaatggctgtccttcgatgtgaccggcgtggtgcggcagtggctttctcgcggcggcgagatcgaagggttccggttgtctgcacattgctcatgcgactcccgagataacactctccaggtagacatcaacggctttactactggaagaagaggcgacctcgccaccatccatggcatgaacaggccatttctgctcctcatggccacccctcttgagagggctcagcacttgcagtcttcacgtcacagacgcgctttagacactaattactgtttctcatctacagagaaaaactgctgtgtacggcagctttatatcgatttcaggaaagatttggggtggaagtggattcatgagcctaaaggatatcatgccaacttttgtctgggaccgtgtccctacatctggtctctggatacacaatacagcaaggtcctggcactttacaaccaacataatcctggcgcaagcgctgctccatgctgcgtgccccaggcactggagcccctccccatagtctattatgttgggcgaaagccaaaagtcgaacagctgagtaacatgatcgttagatcatgtaagtgcagt

SEQ ID NO: 20083 - DNA, 1170 bp, synthetic construct
  misc_feature 1..1170: note = source = /note="Description of Artificial Sequence: Synthetic coding sequence"
  source 1..1170: mol_type = other DNA
atgccgccaagtggactcaggttactgcctctcttactgcccctgctctggctgctggtactgacgccagggcgtccagccgctgggttgtctacctgcaaaaccatcgacatggaactcgttaaaaggaaacgcatcgaagccatcagggggcagatcctgtcaaagctgcgcctcgcaagtccacccagccagggcgaagtgcctccgggacctctgcccgaggcggtgctggctctctacaactctactagagatcgtgttgcaggcgagtcagcagagccagagcccgagcccgaagctgactattatgccaaggaggttactagggtgctgatggtggagacccacaacgaaatttacgacaagttcaagcaaagtacgcattccatttacatgttttttaacacctctgaactcagagaggctgtccctgagccagtgctgttgtctcgtgcagagctcaggctattgcggctcaagctgaaagtggagcagcatgtcgaactgtatcagaagtactccaacaattcttggagatacttatccaatcggctgttggctcctagcgactcacccgaatggctcagcttcgacgttaccggtgtggtgcgtcagtggctctccaggggtggagaaattgagggattccgcttgtccgcacactgctcctgcgactccagagacaatactctgcaggtggatatcaacggctttacgactggacgccgtggcgaccttgcgaccatccatggcatgaaccgaccatttctgctgctcatggcaacgccgctggagcgagcccagcaccttcagtctagtagacatcggcgcgcccttgatacaaattattgctttagcagtactgaaaagaattgttgtgtgaggcagctatacatcgacttccgaaaggacctgggctggaagtggatacatgagcctaaaggctaccatgccaatttctgtctgggcccttgtccatatatttggtccttggatacccagtattctaaagtgctggccctgtataatcaacataatcccggcgcttcagccgcgccatgttgcgtgcctcaggccttggaaccactcccaatcgtttattatgtgggccgaaaaccaaaagtagaacagctgtccaacatgatcgttcgctcctgcaagtgctct

SEQ ID NO: 20084 - DNA, 1170 bp, synthetic construct
  misc_feature 1..1170: note = source = /note="Description of Artificial Sequence: Synthetic coding sequence"
  source 1..1170: mol_type = other DNA
atgcccccttccgggctaaggctcctgcctttgctccttcctcttctctggctcctagtgttgacaccaggaagacccgccgctggactttccacatgtaaaacaatcgacatggaactggttaaacggaaaagaatagaggcgatccgggggcagatactgtccaaactccgcctggcatctccaccatctcagggagaagtgccccccgggcctctacccgaagctgtcctcgcgctttataactccactagagatagagtcgctggagaatccgctgaacctgaacccgaaccagaagctgactattatgcgaaagaagttacaagagtgctcatggtggaaacacataacgagatatatgataaattcaagcagtcaacgcactcgatatacatgttttttaatacatctgaacttcgcgaagcggtacctgaacctgtgctactctctcgggctgaacttagattactgagactgaaactcaaagtggaacagcatgtggaactgtaccagaagtactcaaacaattcttggagatacctgtctaacagactactggctccgtccgattcaccagaatggttgagttttgatgtgactggagtcgtgcggcagtggctaagtcgagggggggaaatcgaagggtttaggcttagtgcccattgctcctgcgatagtcgagataacactctccaggtggatatcaacggattcacaacggggcgccggggggatctcgcaactatccacggaatgaatcggcccttcctgctcctgatggcaactcccctggaaagagcacagcatctacagtccagtaggcatcgacgcgctctcgatacaaactactgcttctcttctacagagaaaaattgctgtgttcgacagctttatattgattttcggaaagatctcgggtggaagtggattcatgaacctaaaggatatcacgctaacttctgccttgggccctgcccctacatatggtccttggatacacagtattctaaagtgctggctctatataaccagcataatcctggggcttcagccgctccatgttgtgttccccaggctctcgaaccccttccaatcgtctactatgttgggagaaaacctaaagtagaacaattaagtaacatgatagtaagatcctgcaaatgtagt

SEQ ID NO: 20085 - DNA, 1170 bp, synthetic construct
  misc_feature 1..1170: note = source = /note="Description of Artificial Sequence: Synthetic coding sequence"
  source 1..1170: mol_type = other DNA
atgccgccgtcgggtttacgactattaccgttattattaccgttactatggttattagttctaacgccgggtcgaccggcggcgggtttatcgacgtgtaaaacgatagatatggaactagtaaaacgaaaacgaatagaagcgatacgaggtcaaatattatcgaaattacgtctagcgtcgccgccgtcgcaaggtgaagtaccgccgggtccgttaccggaagcggtactagcgctatataattcgacgcgagatcgagtagcgggtgaatcggcggaaccggaaccggaaccggaagcggattattatgcgaaagaagttacgcgtgtattaatggtagaaacgcataatgaaatatatgataaatttaaacaatcgacgcattcgatatatatgttttttaatacgtcggaattacgtgaagcggtaccggaaccggtattactatcgcgagcggaactacgtttactacgtctaaaattaaaagtagaacaacatgttgaactatatcaaaaatattcgaataattcgtggcgttatttatcgaatcgactattagcgccgtcggattcgccggaatggttatcgtttgatgtaacgggtgtagtacgtcaatggctatcgcgaggtggtgaaatagaaggttttcgactatcggcgcattgttcgtgtgattcgcgtgataatacgctacaagttgatataaatggttttacgacgggtcgtcgtggtgatctagcgacgatacatggtatgaatcgtccgtttttactactaatggcgacgccgctagaacgagcgcaacatttacaatcgtcgcgtcatcgacgtgcgctagatacgaattattgtttttcgtcgacggaaaaaaattgttgtgtacgacaattatatatagattttcgtaaagatttaggttggaaatggatacatgaaccgaaaggttatcatgcgaatttttgtctaggtccgtgtccgtatatatggtcgttagatacgcaatattcgaaagtattagcgttatataatcaacataatccgggtgcgtcggcggcgccgtgttgtgttccgcaagcgttagaaccgttaccgatagtttattatgttggtcgtaaaccgaaagtagaacaactatcgaatatgatagttcgttcgtgtaaatgttcg

SEQ ID NO: 20086 - DNA, 1170 bp, synthetic construct
  misc_feature 1..1170: note = source = /note="Description of Artificial Sequence: Synthetic coding sequence"
  source 1..1170: mol_type = other DNA
atgccccccagcggtttgcgactgttaccattacttctgcccctgttgtggctgttggtcctaactcctggtagaccggcagcaggtctatcgacctgtaagactattgacatggaattggtaaaaaggaaaaggattgaggcgatccggggccaaatactgagtaaacttcgactggcatctccaccatctcagggcgaagtgccacctggtccactgcctgaggcggtgctggcattgtataatagcaccagagatcgagtggccggcgaatccgccgagccggagcccgagccagaagctgattattacgcaaaagaggtgacgcgtgtcctgatggtagaaacccacaacgaaatctacgacaagttcaaacaatccacccactccatctacatgtttttcaacacctcagaacttcgggaggccgtgcctgagcctgtgctgctatcaagagccgaattaaggttgctcaggctgaagcttaaggtcgaacaacacgttgaactgtaccagaagtacagcaataactcctggcgatacctgtcaaaccgactgttagccccctcagactccccagagtggctctcctttgacgtaactggggtggtgaggcagtggctgtccaggggcggtgagatcgaaggattccgattatccgctcattgttcatgcgactcaagggacaatacactgcaagtggatatcaatgggttcactacaggacgtagaggcgatctggccacgatacacggaatgaacagaccgtttctactattaatggccactccattggaaagggcccagcatctccaaagttctcgacaccggcgagcactggacaccaattactgttttagtagtacggagaaaaattgttgtgtacgacagctgtacatcgacttcagaaaggacttgggatggaaatggatccatgaaccaaagggctaccacgcaaatttctgcttagggccatgtccttacatctggtctctggacacccaatattctaaggttctggctctttacaatcaacacaaccccggcgccagcgcagctccgtgctgtgtgcctcaagcactggagccattgcctatagtgtactacgttgggcgtaagcccaaagtagaacagttatctaatatgattgtccgttcctgtaagtgtagc

SEQ ID NO: 20087 - DNA, 1170 bp, synthetic construct
  misc_feature 1..1170: note = source = /note="Description of Artificial Sequence: Synthetic coding sequence"
  source 1..1170: mol_type = other DNA
atgccaccgtcgggtttgcgtttgctgccacttttgctgcctctcttgtggcttctcgtgctcacgcccggtcgccctgcggccggactttcgacgtgcaaaactatcgatatggaactggtaaaacgaaagagaatcgaggctattagaggccaaatcctttcgaaactgcgcttggcgtcaccaccttcgcagggagaagtgcctccggggccactccccgaggcagttctcgcactctacaactcgacgcgagatcgcgtggcaggcgaatccgctgaaccggaacccgagcctgaagcggattactacgccaaggaggtcactcgagtcctgatggtggaaactcataacgagatttacgacaagtttaagcagagcacccattccatatacatgtttttcaatacctcggaacttcgagaggccgtaccagaaccagtgctgctttcccgcgctgaacttagacttctgcgcctgaagctgaaagtggaacaacacgtcgagctgtatcaaaagtactcaaacaattcgtggcggtatctgagcaaccgtcttttggccccctcagactcccctgaatggctgtccttcgacgtgaccggagtcgtccggcagtggctgtcgcgaggaggagaaatcgaaggatttaggctgtccgcgcattgttcctgcgatagtagagataatactctgcaagtggacattaacggtttcaccaccggacggagaggcgatctggcaaccatacatggtatgaacaggccttttctgcttctgatggcaacgccgctcgaacgggcccaacatttgcaaagctccaggcatcgccgagcactcgatactaattactgtttttccagcactgagaagaattgctgtgttcggcagctctacattgactttagaaaggatctgggttggaaatggattcacgagcccaaagggtaccacgcaaacttctgcctgggaccatgtccttatatctggagtctggatacccagtactcaaaggtcctcgcactgtacaatcagcacaaccctggagcatcggccgcaccatgttgtgtgccccaggcactggaaccccttcctatcgtgtactacgtgggcagaaagccaaaagtggagcaactttcaaacatgattgtccggtcgtgtaagtgctcg

SEQ ID NO: 20088 - DNA, 1170 bp, synthetic construct
  misc_feature 1..1170: note = source = /note="Description of Artificial Sequence: Synthetic coding sequence"
  source 1..1170: mol_type = other DNA
atgccaccctcaggcctgagattgctgcccttgcttttgccactcttgtggctgctggttcttacccccgggaggcctgcagcaggattgagcacctgcaaaactattgacatggaactggtgaaaagaaaaagaattgaggcaattcgcggccagatcctgagtaaacttcggttggcatcccccccttcacagggggaagttcccccaggacctcttcctgaagccgtgctggctctgtacaatagcactagagacagagtggccggcgagagcgctgaaccagaaccagagccggaggccgattactacgccaaagaggtaacacgcgtactgatggtggagacgcataacgagatttacgacaagttcaaacagagcacccactccatctacatgttcttcaacacaagtgaactccgagaagctgtcccagagcctgtgcttctgtctagagctgagctcaggcttctgcggcttaaactcaaggttgagcagcacgtggagttgtatcaaaagtattcaaataattcctggcgctatctcagcaatcgcctgctcgctcccagtgactcacccgagtggctgtccttcgacgtcactggagtggtccggcagtggctgagccggggtggggaaatcgagggcttcaggctgagcgcacactgctcatgtgactctcgcgataataccttgcaggtggacataaatgggttcacaacagggcgcaggggggatctggcaaccatccacggtatgaacagaccctttcttctccttatggcaactccgcttgaaagggctcagcacctgcagtcaagccgccacagacgcgccctcgataccaattattgcttctccagtactgagaaaaattgttgtgttcggcagttgtatattgattttcggaaagacctggggtggaagtggatccacgagccaaaaggctaccacgccaacttttgcctgggtccctgcccgtacatatggtccctggacactcaatattctaaagtcctggcactctacaaccagcacaaccccggagcttccgcagctccatgttgtgtgccccaggctctggaacccctgcccatcgtgtactacgtgggtcgaaaacctaaagtcgagcaactcagcaatatgatcgtgcggtcctgtaaatgctct

SEQ ID NO: 20089 - DNA, 1170 bp, synthetic construct
  misc_feature 1..1170: note = source = /note="Description of Artificial Sequence: Synthetic coding sequence"
  source 1..1170: mol_type = other DNA
atgccgccgagcggactcaggctcttgccgctgctgctgcccctcctttggctgctggtgctcaccccaggacgccctgccgccggactgagcacctgcaagactattgacatggaactggtcaaaaggaagaggatcgaggcgatccggggacagatcctgagcaagctgcgcctggcttcgccgccatcacaaggagaagtgccgccaggaccactgccggaagctgtgctggcactgtacaacagcactagagatcgggtggcaggcgaaagcgcagaaccggaacctgagccggaagctgattactacgccaaagaagtgaccagagtgctgatggtggaaactcacaacgaaatctacgacaaattcaagcaatcgactcattcgatctacatgttcttcaatacctccgagctcagagaggcagtgcctgagccggtgctgctgtcaagagcggaactgcgcttgctgcggctgaagctgaaggttgaacaacatgtggagttgtaccaaaagtactccaacaacagctggaggtacctgtccaatcgcctcctcgcgccgtcagactcaccggaatggctctcgttcgacgtgactggagtggtgcgccagtggctgtcgcggggcggcgagatcgaaggcttcaggttgtcggcacactgttcatgtgattcgcgggacaacactctccaggttgacatcaatggattcaccacggggcgccgcggtgatttggcaaccatccacggtatgaacagaccattcttgttgctgatggctaccccgcttgagagggcgcaacacctccagtcgtcccgacatagacgggcacttgacaccaactactgcttctcaagcaccgagaagaattgttgcgtccggcagctctacatcgatttccggaaagatctgggatggaaatggatccatgaaccgaaggggtatcacgcaaatttctgcctgggaccgtgtccatacatctggtccctggacacccagtatagcaaagtgctggctctttacaatcagcataaccctggagcttccgctgccccttgctgcgtgccacaagcccttgaacctcttccgatcgtgtactacgtcggcaggaagccaaaagttgaacaactttcgaacatgatcgtgcggtcgtgcaagtgctcc

SEQ ID NO: 20090 - DNA, 1170 bp, synthetic construct
  misc_feature 1..1170: note = source = /note="Description of Artificial Sequence: Synthetic coding sequence"
  source 1..1170: mol_type = other DNA
atgccgccgtccggcctgaggctgctgccgttgttgctgccgctgttgtggcttctcgtgcttaccccgggacggcccgcggcggggctgtcgacctgcaagacgatcgatatggagctggtgaagcgcaaaagaattgaagctattcggggacagatcctgtccaaacttcgactggccagcccgccgagccaaggagaggtccccccggggccgctgccggaagcggtactggccctgtacaattcaacccgcgatcgagtggccggagagagcgcagaaccggaacccgaaccggaggccgattactacgctaaagaagtcacccgcgtccttatggtcgaaactcacaatgagatatacgacaagttcaagcagtcaacccactcaatctacatgtttttcaacacttccgagttgcgcgaagccgtgccggaaccagtgctgctgtcgcgggccgaactcagactgctgcgcctgaagctgaaggtcgaacagcatgtggaactttaccagaagtacagcaataactcgtggcggtacctcagcaaccggctgctggccccttcggactccccagagtggcttagctttgatgtgactggagtggtgaggcagtggctgtccagaggaggggagattgaaggattccggctgtcggcccactgctcctgcgacagtagagacaatactctgcaagtggatatcaacggattcaccactggtcggcgcggggatcttgcaaccattcacggcatgaaccggccgtttctgctccttatggcaaccccgttggaaagggctcagcacctgcaatcgtcgcgacatcgcagagccttggatactaactactgcttctcatcgactgagaaaaactgctgtgtgcgccagctgtatatcgatttccggaaggacctcggatggaagtggatccatgaaccgaaaggataccatgcaaatttctgccttgggccgtgtccatacatctggtcactcgacactcagtactcaaaagttctcgcgctgtataatcagcacaacccgggagcgtcagcggccccgtgctgcgtcccacaagccctcgagcctctgccaatcgtttactacgtggggcgaaagcctaaagtggagcaactcagcaacatgatcgtgagatcctgcaagtgctcg

SEQ ID NO: 20091 - DNA, 1170 bp, synthetic construct
  misc_feature 1..1170: note = source = /note="Description of Artificial Sequence: Synthetic coding sequence"
  source 1..1170: mol_type = other DNA
atgccacccagcggactgcgtctgttgcctcttctcctgccgctgctctggcttctggtccttactccaggccgtcctgcagcaggactgtccacctgtaagaccattgatatggagctggtgaagcgaaaacgtattgaagctattcgcggacagatcctgtcaaagctcaggctggcatccccgccatcccagggtgaagttcctccggggcccctgcccgaagcagtgcttgcactctacaactcaaccagggatcgagtggccggtgaatccgctgagcctgaacccgaacccgaggcggattactacgcaaaggaagtgacccgggtccttatggtcgagactcacaacgagatttacgataagttcaaacagtcaacgcactccatctacatgttctttaacacgagcgagctgagagaagccgtgccagaacctgtgcttctgtcccgcgccgagctgcggcttctgcggctgaagctcaaagtggaacaacacgtggaattgtaccagaagtacagcaacaattcatggcgatacctcagcaaccgccttctggctcctagcgattcgcctgaatggctgtcctttgatgtgaccggagttgtgcgtcaatggctgagccggggaggagaaattgaaggttttcggctgtccgcgcattgttcgtgtgattcacgcgataataccctccaggtggatatcaacggtttcactaccggacggcggggcgatcttgcaactattcacggaatgaacaggccttttcttctcttgatggcaactccacttgaaagggcgcaacacctgcagtcctcgcgccatagacgggcactggataccaattactgtttttcgtccaccgaaaagaactgttgtgtgcgtcagctgtacattgatttcaggaaagaccttggctggaagtggatccacgagcctaagggctaccatgcaaacttctgtcttggtccatgtccctacatctggtcccttgacactcagtactcaaaggtgctggcactgtacaatcagcataatcctggcgcaagcgcagcgccatgctgcgtgcctcaagccctggagccgctccctatcgtgtactacgtcgggcgcaagcctaaagtcgagcagttgtcgaatatgatcgtgcgctcgtgcaagtgtagc

SEQ ID NO: 20092 - DNA, 1170 bp, synthetic construct
  misc_feature 1..1170: note = source = /note="Description of Artificial Sequence: Synthetic coding sequence"
  source 1..1170: mol_type = other DNA
atgcccccaagtggactgaggctgctcccgttgctcctgcctctgctgtggctgctggtactcacacccggccgcccagcagccgggctttcaacatgtaagacaatagatatggaactggtgaaaagaaagcgcatagaagccattcgcgggcagatactttcaaagcttcggctggccagtcctccatcccagggagaggtcccccctggacctctgccagaggctgtgctggcgctgtacaactctactagggatcgggtcgccggagagtccgcggaacccgagccagagccagaggccgattactacgcaaaagaggtgacccgggtgttaatggttgagacacacaacgagatttacgacaaatttaagcagagcacccattcaatttacatgttttttaatacctctgaactaagggaggcggtgccagagcccgtgctgctgtctagggccgagctacggttgctgcggctcaagctcaaggtggaacagcacgtcgagctgtatcaaaaatatagcaacaattcatggcggtacttgagtaataggctgttagcaccgtccgactcccccgagtggctgagcttcgatgtcaccggagtggtgcgccaatggttgtccagagggggtgaaatcgaaggattcagactgtcagcccactgttcatgcgatagccgtgataataccctccaggtcgacataaatggcttcaccacaggcaggcgcggggatcttgcgactatccatgggatgaaccgaccctttttgctgttaatggcaactccactggagcgagcccagcatcttcagtcctcacggcacaggcgggctcttgacacaaattactgcttcagctctacggaaaagaattgctgcgtgagacaattgtacatcgattttcgtaaggacctcggctggaaatggatccatgagcctaaggggtatcatgccaacttttgcttgggtccatgtccgtacatttggtcactggacactcagtactctaaagtactggcactctacaaccaacacaatcctggcgccagcgccgccccctgctgcgtcccccaagccctggaacccctgccaatagtttactatgtgggacgcaaaccaaaagttgagcagctgtccaacatgattgtcaggtcctgcaagtgcagc

SEQ ID NO: 20093 - DNA, 1170 bp, synthetic construct
  misc_feature 1..1170: note = source = /note="Description of Artificial Sequence: Synthetic coding sequence"
  source 1..1170: mol_type = other DNA
atgccaccatccggcttgcgcctgctgcctctgcttcttcctctgctctggctattagtgctgacaccaggacgtcccgccgccggtctgagcacctgtaaaacgattgatatggagctcgtgaaaaggaaacgtattgaagccattcgtggacagatcttgtcaaagctgaggctagcgagcccacctagtcagggggaggtgcctccgggtcctttgcccgaggccgtgctcgccctgtacaactcaacccgcgaccgtgttgctggggaaagcgcagagcccgagcccgagcccgaggccgactactatgctaaggaggtgactcgagtactgatggtcgagacacacaacgagatctatgacaaatttaagcagagcacacatagtatttatatgttcttcaacacttccgagctgagggaagccgtgccagagccggtgctgctgagtagagcggagctgcgactactgagattgaagctcaaagtcgaacagcacgtagagttgtatcagaagtacagtaataattcgtggcggtatctgagcaatcgcttgctagctccttcagattcacccgagtggttatcatttgatgtgaccggtgttgtacggcagtggctgagccgaggcggggaaatagagggattccgcttatctgctcattgctcctgtgatagtagggacaatacccttcaggtcgatataaatggatttactacagggcgccgcggcgacctggccactatccacggaatgaaccgtcctttcctgctgctgatggctaccccactagagagggcacagcatttgcagagtagccgccaccgacgagccctcgacactaactactgtttcagttctactgagaagaattgctgtgtgagacagttgtatatcgatttcaggaaggacctggggtggaaatggattcacgaaccaaagggataccacgctaacttctgtctggggccatgcccctacatttggagcctcgatacccagtacagcaaggttctagctctgtataaccagcataatccaggagccagtgccgctccatgctgtgtgccacaagctttagagcccctgcccatagtgtactatgtggggcggaaaccaaaagtggagcagctgagcaacatgatcgtgcgctcttgcaaatgcagt

SEQ ID NO: 20094 - DNA, 1170 bp, synthetic construct
  misc_feature 1..1170: note = source = /note="Description of Artificial Sequence: Synthetic coding sequence"
  source 1..1170: mol_type = other DNA
atgccaccaagcgggctgcggcttcttccacttctgcttccgctcctgtggctgcttgtgcttactccaggacgtcccgcggccggcctttccacctgcaaaactattgatatggagcttgtgaagcgcaaaagaattgaagcaattagaggtcagatcctgtccaaacttaggctggcatccccaccaagccaaggggaagtgcctcccgggcctctgcctgaagcagtgctggcgctgtacaactccaccagagatcgagtcgcaggagagagcgccgaacctgagcctgaaccggaggctgactactacgctaaggaagtcaccagagtgctgatggtggagactcacaatgagatttacgacaaattcaaacaaagcacgcactccatttacatgttcttcaacacctcggaactgcgggaggccgtgccagagcccgtcctgctgtcaagggcggaactgaggctgctgcgactgaagctgaaggtagaacagcacgtcgagctttaccagaaatactcaaacaactcatggcgatacctctccaatcgcctcctggcaccatcagattcgcctgaatggctttcatttgatgtcactggagttgtgagacagtggctctcaaggggcggagaaattgagggttttagactttcggcgcattgttcgtgtgattccagagataatactcttcaagtggatatcaatggtttcaccactggacggcgcggtgaccttgccaccatccatggaatgaacagaccttttctccttcttatggcaactcctcttgagagagcacaacatctgcaaagcagccgacaccggcgcgcgctggataccaactattgtttctcatcaactgaaaagaactgctgcgtccgacagctttacattgattttcggaaggatctgggatggaagtggatccatgagccaaagggctaccatgcgaacttctgcctcggaccttgtccatacatttggagcctcgatacgcagtactctaaggtcctggccttgtataaccaacataatcctggggcgtccgccgcgccttgctgtgtgcctcaagccctggagccgctgcctatcgtgtactacgtcggaagaaagccaaaggtggaacaattgtcaaacatgatagtgcggtcctgtaagtgttcg

SEQ ID NO: 20095 - DNA, 1170 bp, synthetic construct
  misc_feature 1..1170: note = source = /note="Description of Artificial Sequence: Synthetic coding sequence"
  source 1..1170: mol_type = other DNA
atgccaccaagtggacttcgcctgctaccacttttactgccgctcctttggttattggttcttacaccaggacgcccagcggctggattgtcaacttgcaaaacgatagacatggaacttgttaaaagaaagcgaattgaagctatacgtggacaaattctatcgaaacttcgcctcgcatctccaccatcccaaggcgaagtgccaccaggaccgctcccagaagcagttcttgcgctctacaactcgacacgggaccgagtggctggggaatctgctgagccggaaccggagcctgaggctgactattatgcaaaggaggtgactcgtgtattgatggttgagacacacaatgagatttacgataaattcaagcaatcaacgcacagcatctacatgttttttaatacatcagagttgcgtgaagctgtgccggagccggttttgctgtcgagagctgaactcagactgttgcgtttaaaacttaaggttgagcaacatgttgagttgtaccaaaaatattcgaataattcttggagatacttgtctaatcgattgctggctccatcagatagcccagagtggctgtctttcgacgtgaccggagttgttcgtcagtggctttcaagaggaggagaaatcgaaggattccgtttgtcggctcactgctcatgtgattctcgagataacactttgcaggttgatatcaatggtttcactaccggcagacgcggagatcttgctacaattcatggaatgaatcgtccattcctccttcttatggcaacgcctttggagcgggctcaacacttgcaatcctcacgtcacagaagagctttggatacaaattactgtttttcgagtacggagaaaaattgctgtgttcgacagttgtacatcgattttcgtaaagatcttggatggaaatggattcatgaaccaaagggttaccatgcgaatttctgccttgggccctgcccttacatttggagtcttgatactcaatacagtaaagtccttgcgctttataaccagcataacccaggagctagtgcggccccatgttgtgtaccacaggccttggaaccactcccgattgtatactatgtgggacgaaagccaaaagttgaacaactgtcaaatatgattgttcgaagttgtaaatgttcc

SEQ ID NO: 20096 - DNA, 1170 bp, synthetic construct
  misc_feature 1..1170: note = source = /note="Description of Artificial Sequence: Synthetic coding sequence"
  source 1..1170: mol_type = other DNA
atgccaccttcgggtctgagactgctgcccctcctcctcccgctgctttggttgctggtgctcacccccgggcgtcctgctgctggattgtcgacttgtaagaccatcgatatggaactggtcaagagaaaacgcattgaggcaatccgcggtcagatcctttctaagctgagactggcgtccccaccatcgcagggtgaggtgcccccgggacccttgccggaggccgtgctcgcgctctacaactccacgagagatcgggtggccggagagtcggctgaaccagaaccagagccagaagccgactactacgccaaagaggtcacccgtgtgctcatggtcgagacgcataacgaaatctacgacaagtttaaacagtcgacccattcgatttacatgttcttcaacacctcggaactgcgggaggccgttccggagccagttctgctgtcgcgggccgagctgcggttgctccggctgaagttgaaggtggagcaacacgtggagctgtaccaaaagtactccaacaattcctggcggtacctgtcgaacaggctgctcgcaccatcggattcccctgagtggctgtccttcgatgtgactggcgtcgtgagacagtggctcagcagaggaggagaaatcgaggggtttcgactgtcggctcattgttcttgcgattcccgggacaacacgttgcaagtcgacatcaatggatttactactggccggaggggggacctcgccacgattcacggcatgaacagacccttcctcctgctcatggcaactccgctggagcgcgcgcagcatcttcaatcatcccgccaccggcgggcacttgacactaactactgcttctcatccactgaaaagaactgctgcgtgcggcaactttacatcgacttcaggaaagaccttggatggaagtggatccacgaaccaaagggctaccatgcaaacttttgtctgggcccctgtccgtacatctggtccctggacacccagtactcaaaagttctggcgctctacaatcagcacaatccgggagcgagcgctgcgccatgctgcgtgccacaggctctcgaaccgctcccgatcgtgtactacgtcggacggaagcctaaagtcgaacagttgtcaaatatgattgtgcgctcctgtaaatgttct

SEQ ID NO: 20097 - DNA, 1170 bp, synthetic construct
  misc_feature 1..1170: note = source = /note="Description of Artificial Sequence: Synthetic coding sequence"
  source 1..1170: mol_type = other DNA
atgcccccgtccggactgcgcctgctgccgctgcttcttccactgttgtggctcctggtgctcactccaggccggcccgccgctggcctctcgacttgcaagaccatcgatatggagttggtgaagagaaagaggatcgaggctatcaggggtcagatcctttccaaactgcgacttgcttcgccgccttctcaaggggaggtcccgcccggcccgctccccgaggccgtcctcgctctttacaatagcactcgggatcgggtggccggagaatcagcggaacctgaacctgaaccagaagccgactactacgcgaaggaggttactcgcgttctcatggtggaaacgcacaatgagatatacgacaaattcaagcagtcaacccattcaatctacatgttcttcaacacttccgaactgagggaggccgtgccggagccggtccttctttcacgcgccgaacttcgcttgctgagactcaaactgaaagtggaacaacatgtggaactgtaccagaaatactccaacaactcgtggcgctatctgtcaaaccgcctcctggccccgtcggatagcccggaatggctgtcatttgatgtgaccggggtcgtcagacaatggctctcgagagggggcgaaatcgagggattcagactgagcgctcattgctcgtgtgacagccgcgacaacacgctgcaggtggacatcaacgggttcaccactggcagacgcggcgatctggcaaccatccacgggatgaatcgccctttcctcctcctgatggcgacgccacttgagagagcgcaacacctgcaatcgtcaagacaccgccgagcactcgatacgaactactgctttagcagcaccgaaaagaattgctgcgtgcgccagttgtacatcgactttcggaaggatttgggatggaagtggatccacgaaccgaagggttaccacgcgaacttctgtctgggaccatgcccatatatctggtcgctcgacactcaatactccaaggtgctggccttgtacaaccagcataacccgggagcctccgcggcaccgtgctgcgttccccaagccctggaaccattgcctattgtgtattacgtcggccggaagccgaaggtcgagcagctgtccaatatgatcgttagatcttgtaaatgttcc

SEQ ID NO: 20098 - DNA, 1170 bp, synthetic construct
  misc_feature 1..1170: note = source = /note="Description of Artificial Sequence: Synthetic coding sequence"
  source 1..1170: mol_type = other DNA
atgccaccttcagggttgaggctgttgccgctgttacttcctcttctctggctgcttgtactaactcctgggcggcctgccgccgggctaagtacctgcaaaaccatcgacatggaactggtcaagcgcaagaggatcgaagcgattcgaggtcaaatactcagtaagctacgactcgcctctccacctagccagggagaggtgcctccggggccacttcccgaggccgtgctggccttgtataactcaacccgcgatagggtggcgggcgagtccgcagagccagagcctgagcccgaggccgattactacgcgaaagaggtgacaagggtcctgatggtcgaaacccacaatgaaatctacgataaattcaagcagagcactcattctatttatatgtttttcaacacctcagagttgagggaggcagtgcctgagccggttcttctgagccgggctgagctgaggctcctgcgtttgaagctgaaagtagagcagcacgtggagctgtatcagaagtacagtaataactcatggaggtatttgagtaatcgtctgttggcccccagtgattcccctgagtggctgtctttcgatgttacaggagtggtgaggcagtggctgtcccgtggcggcgagatcgaaggctttcgactgtccgctcattgttcctgcgatagcagagacaacacactgcaggtggacatcaatggctttacaactgggcgcaggggcgacctcgccacaattcacggaatgaaccgacccttcctactgctgatggccacacctctggaacgagctcaacacctccagagctctaggcacaggagagcgctcgataccaactattgtttcagctccaccgaaaaaaactgctgcgtccgccagctttacatcgacttccgcaaggacctgggctggaagtggattcatgaacccaagggttaccacgcgaacttctgtcttggcccatgcccctatatctggagcctcgatacacagtatagcaaagttctggctttgtataatcagcataaccctggtgcttcagccgccccctgctgtgtaccacaggctttggagcccctgccaatagtgtactatgttgggcgaaagcccaaagtggaacaactttcaaacatgattgtgaggagttgtaaatgttcg

SEQ ID NO: 20099 - DNA, 1170 bp, synthetic construct
  misc_feature 1..1170: note = source = /note="Description of Artificial Sequence: Synthetic coding sequence"
  source 1..1170: mol_type = other DNA
atgcccccatctgggctacgcctgttacccctgctgctgcctctgctctggctgttggttctcacccccggtaggcctgctgccggtctctctacctgtaaaacgattgatatggagctggtgaagcggaaaaggatagaagccatccgcggacagatcctgagcaaactgaggttggcctctcctcctagtcagggggaggtgccccctggtccccttcctgaagcagtgctggctctgtataactcgacaagagatagagtcgcaggggagtccgcggagccagagccagagcctgaagctgactattacgccaaggaggtgaccagggtgctgatggtggagacacacaatgaaatatacgacaagtttaagcaatctacccacagtatctacatgttcttcaacacgtcagagctgcgagaagcagtgccagagcccgtcctcctgtcccgggccgaactgaggctcttgcggctgaagcttaaggtagagcagcacgtggagttgtaccagaaatacagtaacaactcttggcggtacctgtcaaatagactgctcgccccctctgactcgcccgaatggctcagttttgacgtgaccggagtagtgcgtcagtggctatcccgaggaggagaaattgagggcttcagactgagtgcccactgcagctgtgacagccgtgataatacgttacaggtggatatcaatggctttactaccggacgccggggggacctcgcaaccatccatggcatgaatagacccttcctgcttctcatggcgacacccctcgagcgtgcccagcacttgcaaagctcacggcacagacgcgcccttgacacaaattactgcttttcatctacggagaagaactgctgtgtgcggcagctgtacatagatttcaggaaggacttgggctggaaatggatccacgaaccaaagggatatcatgctaatttctgcctgggtccctgcccgtacatctggagcctggacacccagtatagcaaagttttggcactctacaatcagcacaaccctggagcgtccgctgcgccatgttgcgttccgcaggcactggagcctctccccattgtgtactacgtgggcaggaagccgaaggtggaacagcttagtaatatgatcgtacgctcatgcaagtgctca

SEQ ID NO: 20100 - DNA, 1170 bp, synthetic construct
  misc_feature 1..1170: note = source = /note="Description of Artificial Sequence: Synthetic coding sequence"
  source 1..1170: mol_type = other DNA
atgccaccttcggggctgcgcctcttgccacttctcctgccgctcctttggcttttggtgttgactccaggtagaccggccgcgggactctcaacctgcaagacgatcgatatggagctggttaaacgcaagcgaatcgaggcaatccggggacagatcctctccaaacttaggctggcctcgccaccgagccagggagaggtgcctccgggaccgctgccggaggcggtgctggcgctgtacaactcaacccgggatcgcgtggccggcgagagcgcggagcctgaaccggaaccggaagcggactactacgcgaaggaagtgacccgcgtcctgatggtggaaacccataacgaaatctacgacaaattcaagcaatccacccacagcatctacatgttcttcaatacctcggagctgcgcgaagcagtgccggagcctgtgctgctctcccgcgcggaactcagactgctgagactgaagctcaaagtcgagcaacacgtggaactgtaccagaagtactctaacaactcctggcggtacctttccaaccggctcctcgcaccgtccgattcaccggaatggttgtcgtttgacgtcaccggtgtggtcagacagtggctgtcacggggaggcgaaatcgaaggcttccggctttcggctcattgctcatgcgattcacgcgacaataccctgcaggtggacatcaacggattcacgaccggtcggcggggcgacctggcgacgatccacggaatgaatagaccgttcctgctgttgatggctacccctctggagcgggcccagcacctgcaaagcagcagacacagacgggccctcgacactaactactgtttctcaagcaccgaaaagaactgttgcgtgagacaactgtacatcgacttcaggaaggacctgggatggaagtggatccacgaacccaaggggtaccacgccaatttctgcctgggaccatgcccatacatctggtcactggacactcagtacagcaaagtgctggccctgtacaatcaacacaacccaggagcttcggctgccccgtgctgtgtgccacaagccctggaacctctgccaatcgtgtactacgtgggaagaaagccaaaggtggagcaattgtccaacatgatcgttaggtcgtgcaagtgcagt

SEQ ID NO: 20101 - DNA, 1170 bp, synthetic construct
  misc_feature 1..1170: note = source = /note="Description of Artificial Sequence: Synthetic coding sequence"
  source 1..1170: mol_type = other DNA
atgcccccaagcgggcttcgcctgctgccccttctcctgcctctcctgtggctgctggtgctgactccgggcaggcctgcagccgggctctccacttgcaagaccattgatatggagctcgttaagaggaaacgcatcgaggctatccgagggcaaatcctgagcaagttgcgattagcttctcccccttcacaaggggaagtgcctccaggccccctgcctgaggcagtacttgccctgtataattcaacgcgggatagggtcgcgggcgagagtgctgagccggaacccgagccagaagctgattattacgcaaaggaagtaaccagggtattgatggtggaaactcataatgagatttacgacaagtttaagcaaagtacacatagcatctacatgtttttcaatactagcgagctacgggaggctgtcccagagcctgtgctgcttagtagggccgagcttaggcttttacgcctgaagctgaaggtcgaacaacacgtggagctgtatcagaaatatagcaacaactcttggcgctatcttagcaaccggctcctggccccctcagattctcccgagtggctgtcgtttgacgtaactggagtcgtcaggcagtggctgtccaggggaggagaaatagagggcttcaggctttctgcacactgctcttgtgactcccgcgacaacacactccaggtcgacattaatggcttcaccacagggaggaggggcgatctggcgacaatacatggcatgaaccgcccctttctcttgctgatggctacacctttagagcgagcacagcatttacagagctctagacataggagagctctagataccaattactgtttttcgtctaccgaaaagaattgctgcgttcggcagctctatatagatttcagaaaagacttgggttggaaatggattcacgaacccaagggctaccacgccaacttctgcctcgggccctgtccgtacatttggtctctcgatacacagtactctaaggtgctcgccctatacaatcagcacaatcccggagccagcgcggctccatgctgcgtgccacaggctctggagcccctgcccattgtctactacgtgggacgaaagccaaaggtggaacagctgagcaatatgattgtgaggtcttgtaagtgctct

SEQ ID NO: 20102 - DNA, 1170 bp, synthetic construct
  misc_feature 1..1170: note = source = /note="Description of Artificial Sequence: Synthetic coding sequence"
  source 1..1170: mol_type = other DNA
atgccaccctccggtctgaggctgcttccgttgctgctgccactgctctggctcctggtgcttacccccggacggcccgccgctggactgtcaacctgtaagactattgacatggagttggtgaagagaaaaagaattgaagctatacgaggacaaatcttgtcgaaattaagactggcctccccgccttctcagggagaagtccctcctggacctctcccagaggccgtgctggccctgtacaactctactagagatcgcgtggctggggagtctgctgagcctgaacctgagcctgaagctgattattacgctaaggaggtcactagggtgctcatggtcgaaacccacaatgaaatctacgacaagttcaagcagtccacccacagtatctatatgttcttcaacacatccgagttgcgcgaggccgtgccagagcctgtcttgctgtcgcgggcagaattgcggctgctcagactaaagttaaaagttgagcagcatgtggaactgtaccaaaagtactccaacaactcatggcgctacctctccaatcgcctgcttgccccctcagattcgcctgaatggctatcttttgacgtaaccggcgtggtgagacagtggctgagtagaggcggagagattgaagggttccgcctttccgcccactgttcctgcgactcacgcgataatactttacaggtggatatcaacgggttcaccaccgggagacggggggatctggcgaccatccatggcatgaatcgtccctttttgcttctgatggccacccctctggagcgggcccaacatctgcagtcctctagacacaggagagcacttgataccaactattgcttctcctccaccgagaagaattgttgcgtcagacagctgtatatcgacttccgtaaagatctagggtggaagtggattcatgagcctaagggctaccacgccaatttctgtttaggcccttgtccctatatctggtcactcgacacacagtatagtaaagttttggcactgtacaatcaacacaatccaggtgcctccgcagcaccctgctgcgtacctcaggccctggagcccctgcccatcgtatactatgtgggtaggaagcctaaagtggagcagctgagcaacatgattgtgagatcttgcaagtgcagc

SEQ ID NO: 20103 - DNA, 1170 bp, synthetic construct
  misc_feature 1..1170: note = source = /note="Description of Artificial Sequence: Synthetic coding sequence"
  source 1..1170: mol_type = other DNA
atgccgccttctggcctaaggttgctgccgctcctgctgccactgctgtggttgttggtcctgacacctggccgtcctgcagcgggcctgtcaacatgcaaaaccattgacatggagctcgtgaaacgcaaacgcattgaggcgatcaggggccagatcttgagtaagctcaggctggccagccctccaagccagggagaagtgcccccagggccgctgcccgaagctgtgttggccctctacaactctactagagatcgagtggccggcgaatcggcagaaccagagccggaacccgaggccgattattacgcaaaggaagtcactagggtcctgatggttgagactcacaacgaaatatatgacaaattcaagcagagcactcacagtatctatatgttttttaatacttctgagctgcgcgaggcagtccctgagcccgtcttgttgtcccgagctgagctgagactcctaaggcttaaactgaaagtcgagcagcacgtcgagctctaccagaagtactcaaataacagctggcgctacctctccaaccgacttcttgcgccctccgattcgcctgaatggctgtcattcgacgttacgggtgtggtgcgccaatggctgagccgcggcggtgaaatcgagggctttaggctatctgcccactgctcttgtgattctcgtgacaatacactgcaggtggacataaacggattcactacaggacggagaggggacctcgcaaccatccacggtatgaataggcctttcctactgctgatggcgacccccctggagcgagctcagcacctccagtcgagccggcacaggagagcactcgacaccaattactgtttttcctctactgagaaaaactgctgtgtgcggcagctttacatcgatttcaggaaggacttaggttggaaatggatacacgaacctaagggctatcacgcaaacttctgtcttggcccatgtccatacatttggtccctggacacccagtattcaaaggttctggcactctataaccaacacaaccccggcgccagcgcagcaccttgctgtgttccacaggctctcgagccactgccaatcgtgtactacgtgggtaggaaacccaaagttgagcagctttccaacatgatcgttcgcagctgcaaatgttcc

SEQ ID NO: 20104 - DNA, 1170 bp, synthetic construct
  misc_feature 1..1170: note = source = /note="Description of Artificial Sequence: Synthetic coding sequence"
  source 1..1170: mol_type = other DNA
atgccgccgtcgggactgcgcctgctcccacttctcttgccgctcctgtggctcctggtccttaccccaggccgcccggccgcaggtttgagcacgtgcaagactattgacatggaactggtgaagcgcaagagaatcgaggctatacgcggccaaatcttgagcaaactcagattggccagcccgccgtcccaaggcgaggtgccgccaggacctctgccggaagccgtcctggctttgtacaactcgacccgggatcgcgtcgcgggagagagcgctgagcctgaacctgaaccggaggcagactactacgcaaaggaagttactcgcgtcctgatggtcgagactcacaacgaaatctacgacaaattcaaacagtctacccattcgatctatatgtttttcaacaccagcgaactgcgcgaagcagttccggaacctgtgctcctgtcccgcgctgagctgcgccttctgagacttaagctgaaagtggaacaacatgtggagctctaccaaaagtactccaataactcttggcgctacctctccaatcggttgctggctccgtcggacagcccagaatggctgtcattcgacgtgactggcgttgtgcgccaatggttgtcacggggcggggagatcgaaggcttcaggctgtccgcacactgttcgtgcgactccagggacaacactctgcaggtggacatcaacggcttcacgactggacgccgcggtgatctggctactattcacggaatgaatcgcccgttcctcctgcttatggcaaccccactcgagcgcgcccagcacctgcagtcatcccgccaccggcgcgcgctggataccaactattgcttttcatccaccgagaagaattgctgcgtgcggcagctttacatcgacttccggaaggatctcggctggaagtggatccatgaaccgaagggatatcatgccaacttctgcctgggcccttgtccgtacatctggtcccttgatacccaatactcaaaagtgctggccttgtacaaccaacacaatccaggagccagcgccgccccgtgctgcgtaccgcaggcactggaacccctgcctatcgtgtactacgtgggacggaagccgaaggtggagcagctgtcgaacatgatcgtcagaagctgtaagtgctcc

SEQ ID NO: 20105 - DNA, 1170 bp, synthetic construct
  misc_feature 1..1170: note = source = /note="Description of Artificial Sequence: Synthetic coding sequence"
  source 1..1170: mol_type = other DNA
atgcctccgtccggtttgcgtctgttgcccctgctacttcctctcctctggctgttagtcctgacccctgggaggcctgctgccgggctcagtacctgcaagacgatagatatggaattggtaaaacgcaagcgaatcgaggctattaggggtcagatcctctccaagttacgtctcgcatcacctcctagccaaggtgaggtgcctcctggcccattacccgaagctgtgctggcactctacaactctacgcgcgacagagttgccggtgaaagcgccgaaccagagccggagcccgaagccgactactatgcaaaagaggtgacacgcgttctcatggtcgagactcataacgaaatttacgataagtttaaacagtccacgcactcgatctatatgtttttcaatacctctgaacttagagaagctgttcctgaacccgtacttctctcgagggccgagctccgactcttgagacttaagcttaaggttgaacaacatgtcgagctctatcagaaatatagtaataattcctggcgctatctttctaataggctcttggcaccctcggatagccctgagtggctcagcttcgatgtgactggtgtcgttcgacagtggttgtctcggggaggagaaatcgaggggttccgtttgtcggcgcattgtagttgtgactcgcgagacaacactcttcaggtcgatatcaacggtttcacgacaggtcgtcggggtgatttagcgaccatacacggtatgaaccgtccctttttgctgctaatggcaacaccgttggaaagggcccagcacctgcagtcatctcgtcataggcgagccctagacactaattattgttttagctccacagagaagaattgctgcgtgaggcagttgtatatcgactttcggaaagatttaggttggaaatggatccatgagccaaaaggataccacgcaaacttctgcctcggtccatgcccgtatatatggagtcttgatacccagtacagcaaagtcttggcgttgtacaaccagcataaccctggcgcctccgcagctccatgttgtgttcctcaggccttggagccactgcccatcgtctattacgtcggtcgtaagccaaaggttgaacagctaagcaatatgatcgttcgctcttgcaagtgtagc

SEQ ID NO: 20106 - DNA, 1170 bp, synthetic construct
  misc_feature 1..1170: note = source = /note="Description of Artificial Sequence: Synthetic coding sequence"
  source 1..1170: mol_type = other DNA
atgcctcctagtggattgcggctcttgcctcttttactccctctcttatggctgctggttctgacacccggacgccccgcagctggcttgtctacctgtaagactatcgatatggagctcgtgaaacgtaaacggattgaggccattaggggccaaattctgagtaaactgcgcctggcaagtccccctagccaaggtgaggtaccgcctggacctctgccagaggccgtcctggccttgtataattccacaagagaccgcgtggctggggagtccgctgaacctgagccagaacccgaggcggattattacgctaaggaggtgactagagtcctgatggttgaaacacacaacgagatctatgacaaatttaagcagtctacacacagcatatacatgttcttcaacacatcggagctccgggaagcagtgcccgaaccggtgctcttatcgagagcagagcttagactgcttaggttaaaactgaaagtggaacagcatgtagaactataccagaagtattcaaacaatagctggaggtaccttagtaaccggctccttgcacccagcgactccccagaatggctgagttttgacgtgacgggagtggttagacagtggctgtcacggggaggcgaaatcgaaggttttcggcttagcgcccactgctcctgcgacagccgcgacaacactctccaggttgacataaacggctttacaaccgggaggcggggagatctcgccaccatccatggcatgaaccggccatttctgttgttgatggcgacacctttagagcgggcccaacacctgcaatcctctcgacatagacgagcgcttgacacaaactactgtttttctagcacagaaaagaactgttgtgtgcgacagctgtacatcgacttcaggaaggaccttggctggaaatggattcatgaaccaaaaggatatcacgcaaacttctgtctaggtccctgcccctatatatggagccttgatacccagtacagcaaggtgctcgcactctacaatcaacataaccccggtgcttccgcagccccgtgctgcgtgccccaggctctggaacccctccctatcgtgtactatgtggggcggaagcccaaggttgagcagctgtcaaatatgatcgtcaggagttgtaagtgtagt

SEQ ID NO: 20107 - DNA, 1170 bp, synthetic construct
  misc_feature 1..1170: note = source = /note="Description of Artificial Sequence: Synthetic coding sequence"
  source 1..1170: mol_type = other DNA
atgcctccatcgggtctgaggctgctaccacttctgttgcccctgttgtggttactggttcttaccccagggaggcccgctgcgggtttgtccacttgcaagaccatagacatggagcttgtgaaaagaaagcgcatcgaagccattagaggacagatcctgagtaaactccggctggcgtcacctccatctcaaggcgaggttccaccaggccccctaccagaagcggttttggctctttataatagcacgcgtgaccgagttgccggtgagtccgctgagcctgagccagaacccgaggctgactattacgcgaaggaagtgaccagggtcctgatggtggaaacccataacgaaatatacgacaaattcaagcagtcaacacattccatttacatgttttttaatacatccgaactccgggaagcagtccctgaacctgtgttattgagccgggcggagctgcgcttgttgcggctgaagctcaaggtagagcagcatgtcgagctgtatcagaagtattccaacaatagttggagatacttatcaaacagattgttggcaccgtcagacagccctgagtggctttccttcgacgttacgggcgtggttcggcagtggctgtcccgggggggagaaatcgaaggttttcgtctgagcgcccattgtagctgtgattccagggacaacaccttacaggtggacatcaacgggttcacaaccggtagaagaggcgacctcgccacgatccacgggatgaataggccatttctgttgttaatggcaactcccctcgagcgggctcagcacctgcagtcatctagacaccgaagagcactggacaccaactactgcttttcttcaacggaaaagaattgttgcgtccgccagttgtatattgatttccggaaggacctagggtggaagtggattcatgagccaaagggataccatgcgaacttttgcctcggcccctgtccctacatatggagcctcgacactcagtattcaaaggtgctcgccctctacaaccaacataatccgggcgccagtgccgccccttgttgtgtgcctcaggccctggagccactgccaatcgtgtactatgttggacgcaagcccaaagtggaacagctaagcaacatgattgtgcggtcttgcaaatgtagt

SEQ ID NO: 20108 - DNA, 1170 bp, synthetic construct
  misc_feature 1..1170: note = source = /note="Description of Artificial Sequence: Synthetic coding sequence"
  source 1..1170: mol_type = other DNA
atgccaccttcaggccttcggcttctgccactgcttctaccactgctgtggctgttagtgctgacacctggacggcccgctgctggccttagcacatgtaaaaccatcgatatggaactggtgaaaagaaagcggattgaggcaattcgggggcaaattctcagcaaattacgattggcttctccgccttcacagggtgaagtgccaccaggcccgctccccgaggctgttttggcgctttacaactcaacaagagatagagttgcaggggaatctgcagaaccagagcctgaacctgaggccgactattatgccaaggaagtgactcgggtcttaatggttgagactcacaacgagatatacgataagttcaagcagtccacccatagtatttatatgttttttaatacatccgagctccgagaggcggtccctgagcccgtgctgctctcaagggcagaattgagactgcttcgcctgaagctgaaggtggagcaacacgttgagctttaccaaaaatatagcaacaatagctggcgctacctctctaatcgccttctcgcaccgtcggactcaccagaatggctctcatttgacgtcaccggagtcgtgagacagtggctgagccgggggggtgagattgagggattccgcctcagcgctcattgcagctgtgatagccgggacaacactctccaggtggacatcaacgggttcaccacagggcggcggggcgatctcgctacgatccacggcatgaatcgtcccttcctgttactgatggctactcccctcgaacgtgcacagcacttgcagagttcacgacacagaagggctctggacacaaactactgtttttcctccactgaaaaaaactgttgtgtaagacagctgtacatagacttccgaaaggacctgggttggaagtggattcacgaacctaagggttatcacgctaacttctgtctaggtccctgtccctatatttggtccctcgacacccaatattcaaaggtgctggctctctataatcaacacaaccctggggcatctgcagctccatgctgtgtcccccaggccctagaaccgctgccaatcgtatactacgttggcaggaagccaaaggtggaacagctctccaacatgattgtgaggtcgtgcaaatgttca

SEQ ID NO: 20109 - DNA, 1170 bp, synthetic construct
  misc_feature 1..1170: note = source = /note="Description of Artificial Sequence: Synthetic coding sequence"
  source 1..1170: mol_type = other DNA
atgccaccatcaggcctgagattgctgcctcttctgctgccactgctgtggttgttggtgcttactcctgggaggcctgccgctggacttagcacctgcaagaccatcgatatggaattggttaagcgcaagaggatcgaggctatcaggggacagattctgtcaaagttgaggctggccagtcccccatcccagggcgaggttccgcccggccccctgccagaggccgtcctcgccctgtataactccacccgggatagggttgccggcgagtcagccgagcccgaacccgagccagaagcagactattacgccaaggaggtcacaagggtgctcatggtggaaacccataacgagatctacgataaattcaagcagtctacccacagtatttacatgttcttcaacaccagtgaactgagggaggctgttcctgagcccgtccttttgagccgcgccgagcttaggctgctgagactgaaactgaaagtggaacagcatgtggagctgtaccagaaatactctaataacagttggagatacctgtccaatcgactgctggcccccagcgactcacccgagtggctttcatttgatgtaactggcgtggtgcgccaatggctttccaggggcggggaaattgaggggttcagacttagtgcacactgcagctgtgattcccgcgataacaccctgcaagtggatatcaatggctttaccactggccggaggggggatctggcgacaattcatgggatgaacagaccattcctcttgctcatggccacacctttggagcgggctcaacacctgcagtcatcaaggcaccggagagccctcgatactaactattgtttctccagcaccgaaaagaactgctgtgtccgacagctgtatatcgactttaggaaggatctgggttggaaatggattcacgagcctaaaggctatcatgctaacttttgtctcgggccttgcccctacatctggagcctcgatacccagtattccaaagttcttgcgctctacaaccagcacaatccgggtgcctccgctgctccctgctgcgtgcctcaggccctggaacccctgccaatcgtgtactatgtcgggaggaagcccaaagtcgaacagctctccaatatgatcgtgagatcatgtaaatgttct

SEQ ID NO: 20110 - DNA, 1170 bp, synthetic construct
  misc_feature 1..1170: note = source = /note="Description of Artificial Sequence: Synthetic coding sequence"
  source 1..1170: mol_type = other DNA
atgccaccttcggggctgaggctgctgcccctgctgctcccactcctctggctgcttgtgttgacgccgggcagacctgcagcaggactgtcgacttgcaagaccatcgatatggagctggttaagaggaagcgcatcgaggccattcggggtcagatcctgagcaaactcaggctggcctctccaccatcacagggagaggtgccgccggggccgttgccggaggcagtgctggcactttacaactcgacccgcgatcgggtggcgggagagtcggcggaaccagaacccgaacctgaggcagactactacgcaaaggaggtcacgcgggtgctgatggtcgaaacccacaatgagatctacgacaagttcaagcaaagtacccactcgatctacatgttcttcaatacttcagaacttagagaagctgttcccgagcctgtgctgctgagccgggccgaactgcggctcctgcgcctgaaattgaaggtcgagcaacacgtggaactgtaccagaagtattccaataactcctggcggtacctgagcaacagactccttgcaccctccgatagcccggagtggctgagctttgacgtcaccggggtggtccggcaatggttgagccgagggggagagatcgaaggattcagattgtcagctcactgttcgtgcgactccagggacaatactctgcaggtggatatcaacggctttacgaccgggcggcgaggagatctggcgaccattcacggtatgaatcgccctttcctcctgttgatggcaaccccactggagcgcgcccagcatctccaatcatcacgccatcgcagagcgttggataccaattactgtttctcctcgactgaaaagaactgttgcgtccgccaactctacatagactttcgcaaagacctcggttggaagtggatccacgagcctaaaggctaccatgccaacttctgcctgggaccttgcccatacatttggtccttggatactcaatactcaaaagtgctggccctctacaatcagcataatccgggggcctcggcagcaccatgttgcgtccctcaggcactcgaacccctgccgatcgtttactacgtgggccggaagccgaaggtcgaacagctgagcaacatgatagtgcgctcctgcaagtgttcc

SEQ ID NO: 20111 - DNA, 1170 bp, synthetic construct
  misc_feature 1..1170: note = source = /note="Description of Artificial Sequence: Synthetic coding sequence"
  source 1..1170: mol_type = other DNA
atgccccctagcggcttgcgcctgttacctttgctgttacccttattgtggttgctggttcttacccctggtcgaccagccgctgggctttcaacttgtaaaacaattgatatggaattggtcaagagaaagcgtatcgaggctattaggggacaaattttgtcaaagctcaggcttgcttcacctccgtcccagggtgaggtccctcctggaccgttgcctgaagccgttctcgctctctataactccactcgagacagggttgccggagaatcagctgaacctgaaccagaaccggaagccgattattatgctaaggaagtgacccgcgtactcatggtggagacgcataatgagatctacgataagttcaaacagtcgactcacagcatatatatgttctttaacacctctgaactaagagaggccgttccagaaccggtcttgttaagtagagccgagttgcgtttgcttcgtttgaaacttaaagttgagcagcatgttgagctctatcaaaaatattctaataattcttggcgatatttgtctaaccgtctacttgctcctagcgattcacctgagtggctttcatttgacgttacgggcgtcgtgcgacagtggctttcaagaggaggcgaaatcgaaggttttagactttctgctcattgttcctgcgatagccgtgataacactcttcaggttgatattaatggctttacgactggccggcgaggagacttagctactattcatggaatgaaccgaccattcctgctccttatggcgactcccctggagagagctcaacatcttcagtcttccagacatcgacgtgcattggacactaattattgtttctcgagtaccgaaaaaaattgttgtgtcagacagttgtacatcgatttcagaaaggacttaggatggaagtggattcatgagcctaagggttatcatgcgaatttttgccttgggccttgtccttatatatggtcgctggatacccaatatagcaaagttttagctctatataatcagcataatccgggtgcctccgctgcgccatgttgtgtccctcaagctcttgaacctctcccaattgtatattacgttggtcgtaagcccaaggttgaacaattatctaacatgattgtaaggtcatgcaagtgctcg

SEQ ID NO: 20112 - DNA, 1170 bp, synthetic construct
  misc_feature 1..1170: note = source = /note="Description of Artificial Sequence: Synthetic coding sequence"
  source 1..1170: mol_type = other DNA
atgccgccctcaggcctgcggctgctgccgctcctcctcccgctgctgtggctcctggtgctcactcctggccgtcccgccgcaggactgagcacttgcaagaccatcgacatggaactcgtgaagcgcaagcggatcgaagccatcaggggccaaatcctgagcaagctccgcctggcgtcgccaccgtcacagggtgaagtgccgccgggacctctgccagaggcggtgctggccctttacaactccactagagacagagtggccggggagtcggccgagcctgagcccgagccagaagcggattactatgcgaaggaggtgactagagtgctgatggtggagactcacaatgaaatctacgacaaattcaagcaatccacccattcaatctatatgttcttcaacacctctgaactgagggaagcagtgccggaaccagtgctgctctcccgagcagagctgcgccttctcaggctcaagctgaaagtggaacagcacgtggagctgtatcagaaatactcgaacaattcctggagatacctgtcgaatcggctcctcgcaccgtcggactccccggagtggctctcattcgacgtgactggagtagtccgccagtggctgtccagaggtggagaaatcgaaggcttcaggctgtcagcacattgctcgtgcgattcgcgcgacaacactttgcaagtggacatcaacggcttcaccaccggacggcgcggcgaccttgccaccatccacggaatgaaccggccgttcctcctgctgatggccactccgctcgaacgggcgcagcacttgcagagctcccgccatcgccgcgccctggataccaattactgttttagcagcaccgaaaagaactgctgcgtccggcaactgtacatcgacttccgcaaagacctgggttggaagtggatccacgaaccgaaaggataccacgccaatttctgtctcggaccctgcccatacatctggtccctcgacacgcagtactcgaaagtgttggcgctttacaatcagcataaccctggagcaagcgcagccccgtgctgcgtccctcaggccttggaaccgctcccaattgtgtactacgtcggcagaaagccaaaggtggagcagctgagcaacatgattgtgagatcatgtaaatgctcc

SEQ ID NO: 20113 - DNA, 1170 bp, synthetic construct
  misc_feature 1..1170: note = source = /note="Description of Artificial Sequence: Synthetic coding sequence"
  source 1..1170: mol_type = other DNA
atgccgcctagcgggcttagactgctgcctcttctgcttcctcttctgtggctgctggttctgacgcctgggaggccagccgctggactctccacctgtaagaccattgatatggagctggtcaagcggaagcggatcgaggcgattagggggcaaattctttcgaagctgcgtctcgcctcgccaccctcccagggagaggtgccaccgggtcctctccctgaggcagttctggcactttacaacagcacccgagacagggtggcgggcgaatcggcggagcccgagccggagccagaagccgactactacgccaaagaagtgactcgcgtgcttatggtggaaacgcacaacgaaatctacgacaaattcaaacaatcgacccactcgatttacatgttctttaacaccagtgaattgagagaagccgtgcctgagcccgtgcttttgagtagagctgaacttcggctgctgagacttaagctgaaggtggagcaacatgtggaactttaccagaagtacagcaacaattcgtggaggtacctttccaataggttgcttgcaccatccgattcgcctgaatggctcagctttgatgtgaccggtgtggtacggcaatggcttagccgaggaggcgaaatcgagggattccggctgagcgctcattgctcatgcgacagcagggataacactttgcaagtggacataaacggcttcacgaccggacgaagaggtgatctggcaactatccacggtatgaatcggccgtttctgcttctgatggcaaccccactggagagagctcagcacctgcagagctctcgccatagaagggcccttgatactaactactgctttagcagcaccgaaaagaattgctgtgtgcgccaactctacatagactttcgcaaagatctcgggtggaaatggatacacgagccgaaaggctaccatgcgaatttctgccttggaccatgtccctacatttggtcacttgacactcagtactccaaggtcctcgcactctacaaccaacataatcctggagcgtccgcagccccctgctgtgttccacaggcacttgaaccacttccaatagtgtattatgtcgggcggaagcctaaggtggaacaactctccaatatgatcgtcagatcgtgtaagtgtagc

SEQ ID NO: 20114 - DNA, 1170 bp, synthetic construct
  misc_feature 1..1170: note = source = /note="Description of Artificial Sequence: Synthetic coding sequence"
  source 1..1170: mol_type = other DNA
atgccgccatcgggacttagactgttgcctctgctgctgcctttgctgtggctcttggttcttactcctggacgcccagccgcaggtctgtccacctgtaagacgattgatatggaactggttaagcgcaagcgcattgaagcaatcagagggcagatattgtcgaaactgcggcttgcttcccctccgtcacagggtgaagtgcctcctggtcctctgccggaggcagtgcttgcactctacaactccaccagagatagagtggcaggagagtccgcagaaccagagcccgagcctgaagcagactactacgctaaggaggtgacgagagtgcttatggtggaaacgcataacgagatttacgataagtttaagcaaagcactcacagcatctacatgttctttaacacctcagaactgcgtgaagcagtgccagaacctgtgcttctgtcaagggcagaactcaggctgctgcgactgaagctcaaggttgagcaacacgtggagctgtaccaaaagtacagcaataactcatggaggtacctgtcgaaccggcttctggccccctcggatagccctgagtggctgtcgttcgacgtaactggagtggtgagacagtggctgagtagaggtggggaaatcgaagggtttcgcttgtccgcccattgcagctgtgatagcagggataacaccctgcaagtggacattaacgggtttactactggtcgacggggagatctggccaccattcatggaatgaatcgtcctttccttctgttgatggcaactccgttggagcgcgcccaacatctccagtcgtcaagacataggagagcactggacaccaactactgtttttcatcaaccgaaaagaattgttgtgtgcgccaactctatattgacttccgcaaagatcttgggtggaaatggattcacgaaccaaaaggataccatgctaacttttgccttggaccatgcccttacatctggtcccttgatacccagtatagtaaggtcctcgctttgtacaaccagcacaatcctggcgcttcggcggcaccatgctgtgtgcctcaagcactggagccccttcccattgtctactacgtcggtcgaaagccgaaagtggagcagctcagcaatatgattgtgcggtcctgtaagtgttcc

SEQ ID NO: 20115 - DNA, 1170 bp, synthetic construct
  misc_feature 1..1170: note = source = /note="Description of Artificial Sequence: Synthetic coding sequence"
  source 1..1170: mol_type = other DNA
atgcccccctccggcctgcgactcctgcccctattgttgcctctgctgtggcttctcgtcctgacccccggtcggccggccgcgggcctctcgacctgcaagaccatcgacatggaacttgtcaagaggaaacgcatcgaggcgatcagaggacagatcttatccaaactcaggctcgcctcgcctccctctcagggtgaggtcccgccgggacctttgcccgaggccgtcctcgcgctttacaactctacaagggaccgtgtcgccggcgagtccgctgagccggaacctgagcccgaggctgactattatgctaaggaagtgacccgtgtgttgatggtggaaacccacaacgagatttacgacaagttcaagcagtcgacccacagtatctatatgttcttcaacacctcggagctgcgggaggcggtcccggagccggtcctattgtctcgtgctgagctgcgactgcttaggctcaagctgaaggtcgagcaacacgtcgagctgtaccaaaagtactccaacaattcgtggaggtatctgagtaaccgcctcctagcgccgagcgactcgcctgaatggctgtcgttcgacgtcaccggtgtcgtccgtcagtggctctcccgcgggggtgagatcgaaggtttccgtttgtctgctcactgcagttgcgactctcgggacaacacgctgcaggtcgatattaacggattcacgaccgggaggcgcggcgacctggcaactatccacggtatgaaccgccctttcctcctgctgatggccacaccgctcgaacgtgctcagcacttgcagtcctcccgtcataggcgggcgcttgatacgaactattgcttctcgtctaccgagaagaactgctgtgtgcgccagctctacatcgatttccgtaaagatctgggctggaagtggatccatgagcccaagggctatcacgcgaacttctgcctgggaccctgcccgtacatatggtccctcgacacccaatactcgaaggttctggccctttacaaccaacacaaccccggtgccagcgcggctccgtgttgcgtgccccaagcgttggagccactgccgatcgtctactatgtgggtcgtaagccgaaggtcgagcagttgtctaacatgatcgttcgctcgtgcaagtgctcc

SEQ ID NO: 20116 - DNA, 1170 bp, synthetic construct
  misc_feature 1..1170: note = source = /note="Description of Artificial Sequence: Synthetic coding sequence"
  source 1..1170: mol_type = other DNA
atgccccctagcggactccgcctcctgcctttgctgctcccacttctgtggcttctcgtactgactccgggacgaccagccgccggactgtcgacttgcaagaccatcgacatggaactggtgaagagaaagcgcattgaggcaatccgcggtcaaatcctgagcaagttgaggctcgcttcacctccttcccagggggaggtgcccccaggaccacttccagaggcggttctggctttgtacaactcgactcgtgaccgcgtggcaggagaatccgcagaacctgaaccggaaccggaggcggattactatgccaaggaggtcactagggtgctgatggtggagacgcataacgaaatctacgacaagttcaagcaatcgactcactccatctacatgttctttaacacttccgagcttcgggaggcggtcccggaaccagtcttgctgtcccgcgctgaactgaggctgctccgtctgaagctgaaggtcgaacagcacgtggaactgtaccaaaagtactcaaataacagttggcgctacttgtcgaatcggctgctggcgcctagcgattcgcctgagtggctctcgttcgacgttaccggagtcgtacggcagtggctttcgaggggcggcgaaatcgagggattccggctgtcggcacactgttcctgcgattcccgggataacaccttgcaggtggacattaatggcttcaccacgggacgccggggagatttggcgacgatccatggaatgaatagaccgtttctgctgttgatggcaacccctctcgagcgggcccagcatctgcaatcgagcaggcaccgccgggccctggacacgaactactgcttttcctccaccgaaaagaactgctgcgtccggcagctctacatcgatttccgcaaggacctcggatggaaatggatacatgagccaaagggctaccacgccaacttctgcctgggaccttgcccgtacatttggtcactcgacacccagtattcaaaagtgctggcactgtacaaccagcacaatcccggtgccagcgcggcgccatgctgtgtgccacaggccctggaaccgttgccgatcgtctactacgtggggcgaaaaccgaaagtggaacaactctccaacatgatcgtgcggagctgcaaatgttca

SEQ ID NO: 20117 - DNA, 1170 bp, synthetic construct
  misc_feature 1..1170: note = source = /note="Description of Artificial Sequence: Synthetic coding sequence"
  source 1..1170: mol_type = other DNA
atgccaccgtccggcttgagactgcttcccctgctgttgccgttgctgtggctgttggttctgaccccgggtagaccggctgcaggtctcagtacctgcaagactattgatatggagctcgtgaagcgcaagagaatcgaggctattagaggacagattctcagtaagctgcgccttgcctctccacccagtcagggcgaggtgccgcccggaccgctccctgaagcagtgcttgctctgtataattcaacgagagatcgcgtcgccggcgagtctgcggaacctgaaccggagcctgaggcggactactatgcgaaagaggtaacaagggttctgatggtagagacgcacaacgagatctacgacaaattcaagcagagtacacattccatttacatgtttttcaacacaagcgaactccgcgaggctgtgcctgaacctgtgctgctttcccgcgctgagctgaggttgctcaggttgaaactgaaggtagagcagcacgtggaactgtaccagaagtacagtaacaacagttggcgctatctgtccaataggctgctggctccttccgatagccccgaatggctgagtttcgatgtgaccggagttgtaaggcaatggctgtcaagaggaggagagattgaaggttttcgcctcagcgcccactgctcttgtgatagtagggataatacgcttcaagtagatattaatggctttaccactggtagaagaggtgacttggcaaccattcatggcatgaatagaccgttcctgctgttgatggccactcccctggaacgcgcacagcacctccaatcttccagacatagaagggctttggatactaactattgtttcagttccacggagaaaaactgttgtgttagacagttgtatatcgactttaggaaggaccttggctggaagtggattcatgaacccaagggctaccacgccaatttctgtctgggtccatgcccttatatctggtcccttgacacccagtattcaaaggtgttggctctgtataaccagcacaaccctggagcgtctgctgctccgtgttgcgttccccaagctctggagcctctccccattgtgtactatgtcggaaggaagccaaaagtggagcagctgtctaacatgatcgtccgctcctgcaagtgtagc

SEQ ID NO: 20118 - DNA, 1170 bp, synthetic construct
  misc_feature 1..1170: note = source = /note="Description of Artificial Sequence: Synthetic coding sequence"
  source 1..1170: mol_type = other DNA
atgcccccttcgggtctgcgcctgctgccacttctcctgcctcttttgtggctgttggtgctcaccccaggcagaccagcggcgggcctttcgacctgtaagacgatagatatggaactggtcaagcggaaacgaatagaggccatcagggggcagattctctcaaagctgcgtctggcaagcccgccttcgcaaggtgaggtccctcctggacctctccctgaggccgtgctggcactttacaacagcacgcgcgacagagtggcaggggaatccgcagaacctgagcccgagcctgaggccgattactatgcaaaggaagtgacccgcgtgctcatggtggagactcataacgaaatctacgataagtttaagcaatccacccattccatttacatgtttttcaacacctccgagttgagagaggcagtgcctgaaccggtgctgctcagcagagcagagcttcgactccttcgtctgaaacttaaggttgagcagcatgttgaactctaccagaagtattccaacaattcatggcggtacctgtcgaatcggctcttggcgccttctgacagtcctgaatggttgtcgttcgatgtgacgggagtcgtgaggcagtggctctcacgaggcggtgagattgagggattccgcctgagcgcacattgctcgtgcgattcacgagataacaccctccaggtggatatcaatggttttaccaccggtagacggggggacctcgcaaccattcacggaatgaaccggccattcctgcttctgatggcaaccccgctggagcgagcacaacatctccaatcttcgagacacagaagagcccttgacacgaactactgcttttcctcgactgagaaaaactgttgcgtgcgtcaactctacattgattttaggaaggacctgggatggaagtggattcacgaacccaagggttaccatgctaatttctgtctcggaccatgtccttacatatggtccctggacacccagtactcgaaggtcctcgcactgtacaatcaacataatccaggagcatcagcagcgccatgttgcgtgccccaagccctcgagccgctgcctattgtgtactacgtcggcagaaaacctaaggtggaacaactgtcaaacatgattgtgagatcctgtaagtgctcg

SEQ ID NO: 20119 - DNA, 1170 bp, synthetic construct
  misc_feature 1..1170: note = source = /note="Description of Artificial Sequence: Synthetic coding sequence"
  source 1..1170: mol_type = other DNA
atgccaccctctggattgaggctcctgcctcttctcctccccctactgtggctcctggtactgacccccggccgacctgccgcaggcctctccacatgcaagaccattgacatggagttggtgaaaagaaaacgaatcgaggcgattcgcggccagatcctgtcaaaactgcgactggcctcacctccctctcagggagaagtgccaccaggacctctgcccgaggccgtgctggctttgtataactctactcgagacagggttgcgggagagtccgctgaacccgagccagagccggaggccgattactatgctaaagaggttaccagagtcctgatggttgagactcacaacgagatctacgataagttcaaacagagtacccactctatatatatgttttttaataccagcgagctgcgagaggccgtaccggaacccgtcctattgagtcgcgcagagttgcggctcctgagattaaaacttaaagttgaacagcatgtcgagttgtaccagaaatactctaataatagctggcgatacctctctaataggttgctggcccccagtgattctcccgagtggttgagtttcgatgtaacgggagtggtccgtcaatggctctcacgtggaggtgagattgagggattccggctgtctgctcactgcagctgtgattcaagagataacaccttacaagtggacatcaatgggtttacaacgggccgtcgcggggacctagcaacaattcacggcatgaacagaccattccttctcctcatggctactccactggagcgagcacagcacctgcagtcttctcgccacaggcgggcccttgatacgaactattgtttttcgtccacagagaaaaattgctgtgtgcgccagctgtacatcgattttaggaaagatttgggatggaaatggatccacgaacccaaggggtaccacgccaacttttgcctcggaccctgcccctacatttggagccttgacactcaatactcgaaggtactcgctttatacaatcagcacaaccctggggcttctgctgccccctgctgcgtgccgcaggctctggagccactgcccattgtgtattacgtgggcagaaaaccgaaagtggaacagttgtctaatatgatcgtgcgaagctgcaaatgcagc

SEQ ID NO: 20120 - DNA, 1170 bp, synthetic construct; identical to SEQ ID NO: 20075
  misc_feature 1..1170: note = source = /note="Description of Artificial Sequence: Synthetic coding sequence"
  source 1..1170: mol_type = other DNA

SEQ ID NO: 20121 - DNA, 1170 bp, synthetic construct
  misc_feature 1..1170: note = source = /note="Description of Artificial Sequence: Synthetic coding sequence"
  source 1..1170: mol_type = other DNA
atgccgccatcggggttgcgccttctcccactccttctgccgcttctgtggctccttgtgctgactccgggaaggcctgctgcgggactctcgacctgcaagaccatcgacatggagttggttaaaaggaagcgaatcgaagctatccgcggacagatcctctcgaagctcaggcttgcgtcgccgcctagtcaaggagaagtgccccccggaccgctgcctgaagctgtgctcgctttgtacaactcaacccgggaccgtgtggccggggaatcggcagaaccggaacccgaaccggaagccgactattacgcgaaggaagtgacgcgggtcctgatggtcgagactcataatgagatctatgataagttcaaacagtcgacccattcaatctacatgttcttcaacacttcagagctgcgcgaagccgtgccggaacctgttttgctctccagggccgagcttcggctgcttagactgaagctcaaagtcgaacaacacgtggagctttaccagaagtatagcaacaactcatggcggtacctgagcaataggctcctggcaccatcagattcccccgagtggctctcgtttgatgtcactggagtcgtgagacaatggttgtcaagaggaggagagatcgagggcttccgtctgagcgcgcattgctcctgtgacagccgcgacaatacccttcaggtggacatcaacgggtttaccacgggccggcgcggcgacctggccactattcacggaatgaacaggccgttcctgctgctgatggccacgccactggagagggctcagcacctccaatcctcccgccatagacgggccctggataccaattactgcttcagcagcaccgagaaaaactgttgcgtgcggcagctctacatagatttcagaaaggatctcggctggaagtggatccacgagcctaagggctaccacgcaaacttttgcctgggaccgtgcccgtacatttggtcgttggacactcagtactccaaagtgctggcgctttacaaccagcacaacccgggtgcatccgccgcgccatgttgcgtgcctcaagccttggagccacttccgattgtatactacgtgggtcgtaaacccaaggtcgaacagttgtcgaatatgatcgttcgaagctgcaagtgtagc

SEQ ID NO: 20122 - DNA, 1170 bp, synthetic construct
  misc_feature 1..1170: note = source = /note="Description of Artificial Sequence: Synthetic coding sequence"
  source 1..1170: mol_type = other DNA
atgcccccctccggcctccgattgttacctctgttgctcccactgctttggctactagtgttgacgcctgggcgacccgctgcaggactgtccacttgcaagaccattgacatggagcttgtgaaaagaaaaagaatagaagctattagaggccagatcttgtccaaactcaggctggctagcccacctagtcagggcgaggttccacctgggcctctgcctgaggcagtgcttgccttgtacaacagcacccgtgaccgggtggcaggggaatctgccgagcccgagcccgagcctgaagctgactactatgctaaggaagtgacccgagtgctgatggtggagacacacaacgagatttacgacaaatttaagcagtcgactcactccatctatatgttcttcaatacctccgagcttagggaagccgtccccgaaccagtcttgctgtcacgcgctgagctgcggctgctaaggttaaagctgaaagtcgagcagcacgttgaactataccagaaatattccaacaactcgtggcggtacctttccaaccgcttactcgccccttctgattcacccgagtggctgagttttgacgtcactggagtagttcggcagtggttaagtcgggggggcgaaatcgagggcttcaggctgagtgcacactgtagttgtgacagcagagacaacactttacaggtcgatattaacggatttacaaccgggcgacgcggcgacctggccactatccacgggatgaataggccgttcctactgttgatggccaccccgctggaacgagcccagcacctccaatcctctagacatagacgcgccctggataccaattactgtttctcctcaacagagaagaattgctgcgtgcgtcagctctacatagattttcggaaggacctgggttggaagtggatccatgaaccgaagggataccatgctaacttctgtcttggcccatgcccttacatttggtcactggatacccagtacagcaaggtgctagcgttgtataatcagcataatcccggcgcgtctgccgcaccttgttgcgtacctcaagcactggaaccattgcctattgtctattacgtaggcagaaagccaaaggtagaacagctgtccaacatgatcgttcgttcttgtaagtgctcc

SEQ ID NO: 20123 - DNA, 1170 bp, synthetic construct
  misc_feature 1..1170: note = source = /note="Description of Artificial Sequence: Synthetic coding sequence"
  source 1..1170: mol_type = other DNA
atgccccctagtggacttagactcctcccactcctcctgccacttctgtggcttctggttctgactcccggaaggcctgctgccggcctcagcacatgtaaaactatagacatggagctagtgaaaagaaaaaggatagaggcaatccggggacaaatcttgagtaaactgaggttagcttcgcctccgagccagggcgaagtccctccaggccctctgcccgaagcagtgttagccctgtataacagcaccagggatcgggtggcaggcgaaagtgccgagccagaaccagagcctgaagcagattactacgctaaggaagtgacacgggttcttatggtcgaaactcacaatgaaatctatgataagttcaaacaatcgacacactctatttatatgttttttaatacaagcgagctaagggaggccgtccccgagccggttctgctctccagagccgagctgcgcctcctcaggttgaagctgaaagtggagcagcacgtcgagctgtatcagaaatacagcaacaactcttggaggtaccttagcaacagattgttggctccaagcgactctcctgaatggcttagttttgatgttacaggggtggtgagacagtggctgagccgcggaggtgagatcgagggctttcgactgtccgcccattgcagttgtgattcccgcgacaatacacttcaggtggacataaacggctttacgactggaaggagaggagaccttgcgactatccatggaatgaatcgccccttcctgctgcttatggccacccctttggagagggcgcagcacttgcagtcgtcaaggcaccgacgagcgctggatacaaattattgcttttcttcaaccgagaagaactgctgcgtgaggcaactatacatcgattttaggaaggatttgggctggaagtggatacatgagcccaaaggctatcatgcaaacttctgcctggggccatgcccctatatctggtctcttgatactcagtatagcaaagtgctggctctgtataaccagcacaatcccggtgccagcgctgccccttgctgcgtgccacaggctctggagccattgcccatcgtgtactatgtcgggagaaagccaaaggtggaacaactgagcaacatgatagtgagatcgtgcaaatgtagt

SEQ ID NO: 20124 - DNA, 1170 bp, synthetic construct
  misc_feature 1..1170: note = source = /note="Description of Artificial Sequence: Synthetic coding sequence"
  source 1..1170: mol_type = other DNA
atgcctccatcaggattacgacttttaccattattacttcctttattatggcttttagtattaacaccaggacgtccagcagctggattatcaacttgtaaaacaatagatatggaattagttaaaagaaaaagaattgaagctattagaggacaaattttatcaaaattaagacttgcttctccaccatcacaaggagaagttcctccaggaccacttccagaagctgtacttgctctttataattcaacacgtgatagagtcgcaggagaatcagcagaaccagaaccagaacctgaagctgattattatgcaaaagaagtaactagagttttgatggttgaaacacacaatgaaatctatgataaatttaaacaaagtacacattcaatttatatgttctttaatacatcagaattacgagaagcagttcctgagccagttttactttcaagagctgaattaagattattaagattaaaactaaaagtagaacaacatgttgaattatatcagaaatatagtaataattcatggagatatttatcaaatagattattggctccttctgactctccagaatggttgagttttgatgtaacaggtgttgtaagacaatggttaagtagaggtggtgaaattgaagggttcaggttatctgcacattgttcttgcgattctagagataatacattgcaagtcgatattaatggatttactacaggtcgacgtggtgatttagctacaatacatggaatgaatagaccttttcttcttcttatggctactccacttgaaagagctcaacacttacaatctagtagacatagacgtgcactagatactaattactgtttttcatctacagaaaaaaattgttgtgttcgacaactttacattgattttagaaaagatttgggttggaaatggattcatgaaccaaaaggatatcatgcaaatttttgtttgggaccatgtccttatatatggtcattagatacacaatattcaaaagttttagccttatataatcaacataatccaggagcttccgcagcaccttgttgtgttccacaagcattagaacctttgccaattgtatattatgttggaagaaagccaaaggttgagcaattatctaatatgattgtaagatcatgtaaatgttca

SEQ ID NO: 20125 - DNA, 1170 bp, synthetic construct
  misc_feature 1..1170: note = source = /note="Description of Artificial Sequence: Synthetic coding sequence"
  source 1..1170: mol_type = other DNA
atgcccccatccgggctgcgactcctgcccttgctcctgcctttgttatggttgttagtgctgacgcccgggaggcccgcggcagggctctcgacctgtaagaccatagacatggagttagtcaagagaaagcgtattgaggctatccgggggcagattctgagcaagttgcgcctggcgtcccctcctagtcagggtgaggtgcctccaggccctttgcctgaggcagtgctggccctatacaacagcaccagagaccgcgttgccggggaatctgccgagccggagccggaacccgaagctgactactatgccaaggaggttacgagggtccttatggtggagacacataatgaaatttacgataaattcaagcagtctactcacagcatctatatgttttttaatacatcagaactgcgggaagcagtgcctgagcctgtgcttttgagtcgcgctgagctaaggctgttgcgcctgaaactcaaagtcgagcagcacgtcgagctgtaccagaagtacagcaataatagctggaggtacctgtctaacaggctgctcgccccctcggactccccggaatggctctcctttgatgtcacaggggtcgtacgacaatggctatctcgcggtggggaaatcgagggatttaggctctctgctcactgtagttgcgactctcgcgataatacgctacaagtcgacatcaacggtttcacgacaggccgcagaggggatctggctaccattcatggcatgaaccgaccttttcttctcctgatggccacccctctggagagggctcagcaccttcagtcgtccaggcacaggcgcgcccttgacaccaattactgcttttcctccactgagaaaaattgctgcgtgcggcaactgtacatcgattttcggaaagacctgggatggaagtggattcacgaacccaaaggctatcatgccaacttctgtctcggaccatgcccctacatttggagtctagacacgcagtactctaaagtacttgctctatacaaccagcacaaccccggtgcaagcgctgcgccctgctgtgtcccacaggctctggaaccattgcctatcgtgtactacgtgggtcggaaacctaaagtggaacaactgtccaatatgattgtcagaagctgtaaatgctca

SEQ ID NO: 20126 - DNA, 1170 bp, synthetic construct
  misc_feature 1..1170: note = source = /note="Description of Artificial Sequence: Synthetic coding sequence"
  source 1..1170: mol_type = other DNA
atgccaccatctggattgcgtcttctccctctgctgcttccattgctctggcttctggtgttgacacccggaaggcccgccgctggtctctccacttgcaaaaccatcgatatggagctggttaagagaaagaggatagaggccatcagaggtcagatcttgagcaaattgcgtctcgcatcacctccttcccaaggtgaagtccctccaggccctctccctgaggcagtcctggctctttacaatagcacccgcgatagggtggccggagaaagtgcagagcccgaacccgaaccagaggctgattattatgctaaggaagtgacacgcgtccttatggtggaaacacataatgaaatatacgacaagtttaaacagagtacccacagcatctacatgttcttcaacacatccgaactgagagaggcagtacctgaaccagtgctcttgagtagggctgaactgaggctgctcagactgaagctgaaggtggagcagcacgtagaactctatcagaagtactcaaataattcttggagatacctcagtaatagactccttgcaccatccgattcaccagagtggttgtctttcgatgtcaccggtgtcgtcaggcagtggctctctcgtggtggagagatcgagggatttagactctccgcacactgctcatgcgattccagagacaatacccttcaggttgacattaacggcttcacaactggccgtcgcggcgacttggccactattcacggcatgaaccgtccttttctgttgctgatggcaaccccactggagcgtgcacagcacttgcagtcctctagacacagaagggcccttgatactaactactgtttcagttccaccgagaagaactgctgcgtgaggcagctctacattgacttccgcaaggacctgggttggaaatggattcatgaacccaaaggatatcatgctaatttctgtctgggtccatgcccctacatctggtccttggacacacaatatagcaaggtgctggcactttataaccagcacaatccaggcgcctcagccgccccatgctgtgtgcctcaggccctggagccactgcctattgtgtactatgtaggacgtaaacctaaggtcgagcagttgtctaacatgattgtgagatcatgcaagtgtagc

SEQ ID NO: 20127 - DNA, 1170 bp, synthetic construct
  misc_feature 1..1170: note = source = /note="Description of Artificial Sequence: Synthetic coding sequence"
  source 1..1170: mol_type = other DNA
atgccaccatcaggcctccggctgcttccgctgctgctgccactcctgtggctgcttgtcctgacgccaggccggccagctgcggggttgtctacatgtaagaccattgacatggaactcgtgaaaagaaagcggattgaagccattaggggtcagatccttagcaagctgagactcgcttcccccccctcacaaggagaggttccccctgggcccctgcctgaagccgtgctggccttgtacaattccactagagacagggtggccggcgaaagtgccgagccggaaccagaacctgaagccgattactacgccaaggaggtgactagagtattgatggtggagacccacaatgaaatatatgacaagttcaagcagtctacacactcaatctacatgttcttcaacactagcgaactgagggaggccgtcccggaacccgtgttgctgtctcgagccgaactgcgcctcctgcggcttaaattgaaggtggagcaacatgtagagttgtaccagaagtattcaaataatagttggagatatctgtccaaccgtctgctagctcctagcgactctccggagtggctgtcattcgatgttaccggggtggtcaggcagtggctgtcccgaggaggcgaaatcgaagggtttaggctcagcgcacactgctcgtgtgactcaagggacaacactctgcaggtggacatcaatgggtttacaaccgggcgacggggggacctcgccacaatacacggcatgaataggcctttcctgttgctcatggcgacccccctggagcgcgcccaacatctgcaaagttcacggcatcgcagagcattagacaccaactactgtttttcttctacagagaaaaactgctgtgtacgccaactgtatatcgacttccgcaaggacctggggtggaagtggatccacgagcccaagggatatcacgccaatttctgtcttggcccttgtccatacatttggagcctggacactcagtattcgaaggtgctcgccctatacaaccagcacaaccccggggcctcggctgccccctgttgcgtcccacaggcgctcgagccactccctatcgtatactatgtaggacggaaacctaaggtggaacagttaagcaacatgattgttcgttcatgtaagtgtagc

SEQ ID NO: 20128 - DNA, 1170 bp, synthetic construct
  misc_feature 1..1170: note = source = /note="Description of Artificial Sequence: Synthetic coding sequence"
  source 1..1170: mol_type = other DNA
atgcctcctagcggacttcggcttcttccgcttctgcttcccctcctttggctgcttgtgttgaccccaggacgcccagctgccgggctgtccacttgcaagaccattgatatggagttggtcaaaagaaagaggatagaagcaattagaggacagattcttagcaagttgaggttggcgtcccctccgtcccagggcgaggtgccacccggacctcttcccgaggcagtcctggcgttgtacaactcgacgagagatagagtggccggggaatccgccgaacccgaacctgaaccggaagcagattactacgccaaggaggtgaccagggtgctgatggtcgaaactcataacgagatttacgataagtttaaacagtcgactcattcaatttacatgttctttaacacctcggaactccgagaagctgttcctgaacctgtccttctttccagggcggaactccgcctgctgcgccttaagctgaaggtggaacaacatgtcgagctctaccagaaatactccaataactcgtggagatacctgagcaacaggctgctggcaccatcggactcgcctgagtggcttagcttcgatgtgactggagtggtgagacaatggctttcgagagggggagagattgaaggatttcgcctgagcgcacattgcagctgcgattcgagagacaatacgcttcaagtggacattaatggattcaccacgggtaggcgaggcgacttggcgactattcatggaatgaaccgcccctttctcctgctgatggcaactccactcgagcgagcacagcatcttcaatcgtcccggcacagaagggcactcgataccaactactgtttttcatccactgagaaaaactgttgtgtgcgccagctgtacattgatttcaggaaggacctcggttggaaatggattcacgagccaaagggttaccacgcaaacttttgtctcggaccctgcccttacatttggtcgctggatacccagtacagcaaggtgcttgcactttacaaccaacacaatccaggagcaagcgccgccccgtgttgtgtcccgcaagcgctggaaccactgccaatcgtgtactacgtgggacggaaacctaaagtggagcagctcagcaatatgatcgtgcggtcatgtaaatgctcc

SEQ ID NO: 20129 - DNA, 1170 bp, synthetic construct
  misc_feature 1..1170: note = source = /note="Description of Artificial Sequence: Synthetic coding sequence"
  source 1..1170: mol_type = other DNA
atgccaccttcaggcctgcggctgcttcctttgctgcttcctcttctctggctccttgtgcttactccaggacggccagcagcaggcctgtccacctgcaaaaccattgatatggagcttgtgaagagaaaacgaattgaagcaataagaggacagatccttagcaagctgcggcttgcatcgccaccttcccagggtgaggtgcctccaggtccacttccagaagccgtcttggccttgtataacagcacccgtgatagagtggcaggggaatcggctgagccggaacccgaacctgaagcagactactacgcaaaggaggtgaccagagtgctcatggtcgaaacccacaacgaaatctacgataagttcaagcaatcaactcattcaatttacatgtttttcaacacttcggaacttagggaagcggtgcctgaaccagtcctgctctctcgggcggaactccgtctcctccgacttaagttgaaagttgagcagcacgtcgagctgtaccagaagtactccaacaactcgtggaggtacctctcgaaccgactgcttgctcctagcgactctccagagtggctttcgtttgatgtgactggagtcgtgcgacaatggctctcccggggaggggaaatagaaggctttagactgagcgctcactgttcgtgcgactcgcgcgataacactctgcaagtcgacataaacggttttaccaccggacgtcgcggtgatcttgcaaccattcatggaatgaaccgcccttttcttcttctcatggcgacccccctggagagagcacaacaccttcaatcgtccaggcataggagagcgctcgatacgaactactgcttcagtagcaccgagaagaactgttgcgttcggcagctttacatcgattttcgcaaggatctgggatggaagtggatccatgaaccgaaaggataccacgccaatttctgtctgggaccctgtccatacatttggagcctggatactcagtactccaaggtgcttgcactgtacaatcaacataatcctggagcctccgcagcaccatgttgcgtgccccaagcactcgagcccctccctattgtgtactacgtcggaagaaaacccaaggtggaacagctttccaacatgatagtgagatcctgcaagtgttcg

SEQ ID NO: 20130 - DNA, 1170 bp, synthetic construct
  misc_feature 1..1170: note = source = /note="Description of Artificial Sequence: Synthetic coding sequence"
  source 1..1170: mol_type = other DNA
atgcccccctctggtcttaggctactgcctctgctacttcctctcctgtggttgctcgttctgactcccgggagacccgcagcggggctttccacatgcaagaccattgacatggagcttgtcaagcggaagcgcatcgaggcaatcaggggtcagatattgtcaaaactcagactggctagccctcctagccagggtgaggtccctcccggccccctgccagaagcggtgctggctctttataattctacccgagatagggttgccggggaatcagccgagcctgaaccagagcctgaagcagattactatgccaaagaggttacacgtgtactcatggtggaaactcacaacgaaatatatgacaagttcaaacagtctacacactccatttatatgtttttcaatacttctgaacttcgtgaggcagtgcctgaacccgtgctgctctccagagcggagctgcgtctgctgagactgaaattgaaggtggaacaacatgtcgagctgtatcagaagtacagcaacaacagttggagatacttgtccaatagactgctcgctccatccgacagccctgaatggctgtcttttgatgtcacaggagtggtgagacagtggctcagcagaggaggcgaaatcgaagggttccgtctttccgcccactgttcatgcgactctcgcgacaatacccttcaggtggacataaacgggttcactaccggaaggcggggcgatctcgcaaccattcacggcatgaacaggccgtttctcctcctgatggccacgcccctcgaaagagcacaacacctccaaagtagtagacacaggcgggcactcgatacgaactattgctttagctcaaccgagaagaactgttgtgtccggcagctttacatcgactttcggaaagacttagggtggaagtggattcacgaacccaagggctatcacgctaacttttgtcttggaccgtgtccctatatctggtctcttgacacgcagtacagcaaggttctcgcactgtacaaccagcacaaccccggcgcctctgctgctccatgctgcgttcctcaggcactcgagcctctgcctattgtctattacgttggtcgtaaacccaaggtcgagcagctctcaaatatgattgtgagatcctgtaagtgttcg

SEQ ID NO: 20131 - DNA, 1170 bp, synthetic construct
  misc_feature 1..1170: note = source = /note="Description of Artificial Sequence: Synthetic coding sequence"
  source 1..1170: mol_type = other DNA
atgcccccatctggattaaggctgcttccactgttactcccacttttatggcttctcgtgctgacgccgggacgcccagctgctgggctctccacctgcaagactatcgacatggagctggtcaagaggaagcgcatcgaggccatccgagggcagatcctgagcaaactgagattagcttctccgccttcacaaggtgaggtgccccctgggccactcccagaagccgtgctcgcattatacaacagtacaagggatcgagtcgccggcgaatccgccgaacctgaacccgagccggaggccgattactatgcgaaagaggttactcgcgtactgatggtagagacacataatgagatatatgataagttcaagcaatccacccacagcatatacatgtttttcaatacaagcgaacttagggaagccgtgcccgagcccgttttgttgtctcgcgctgagcttcgactgctgcgcctgaagctaaaggttgagcagcatgtggaactgtaccagaagtactcaaacaatagctggcgctacctatcaaacaggctcctcgccccaagcgactctcctgaatggttaagctttgatgtgaccggtgtggtccgtcagtggctctctcgcggcggggaaatcgaagggtttagattaagtgcgcattgtagttgcgattccagggacaacacattgcaagtggacattaacgggtttactactgggagaaggggggacctggctactatccatggaatgaacaggccgtttctccttctgatggctacacccctggagcgtgcacagcatctacagagctcgcgccacagacgtgcccttgacacaaactattgtttcagtagcactgaaaaaaactgttgcgtgcgccagctatacattgattttaggaaggaccttggttggaaatggatccatgagccaaaaggctatcacgccaatttctgcctgggaccctgcccctacatctggagcctggatacccagtatagtaaggtgctggccttgtacaaccagcacaacccaggagcctctgcagcaccgtgctgcgtcccccaggcactagaacctctgcctattgtctattacgttggccgtaagccaaaagtggagcaactgtccaatatgatcgttaggtcatgtaagtgcagt

SEQ ID NO: 20132 - DNA, 1170 bp, synthetic construct
  misc_feature 1..1170: note = source = /note="Description of Artificial Sequence: Synthetic coding sequence"
  source 1..1170: mol_type = other DNA
atgcccccctctgggcttaggctgctgccactgcttttgccacttctatggttgctggttctgactcccggccgacccgctgctggtctttcaacttgcaagactatcgatatggagcttgtaaagcgaaagcgaattgaagcgatccggggccaaatcctgagcaaactgcgcttagcgagccctccatcccagggcgaggtgccccccggacctctgcccgaagccgtgctggctctctataatagtacccgggaccgggtggctggtgaatccgctgagccggaaccagagccagaagccgactactatgctaaagaagtgacccgggtcctcatggtagagactcataacgaaatttacgacaagttcaagcagagtacccactccatttatatgttcttcaatacaagcgaactcagggaagctgtacccgagccagttctcctcagccgggctgagttgcgactgctccgccttaagttaaaggttgagcagcacgtggagctgtatcagaaatatagcaacaatagctggaggtatcttagcaacagattgctcgctccaagtgattcccctgagtggctgagcttcgacgtcacaggagtcgtgcgccagtggctgtcccgtgggggagaaatcgagggcttccgtctctcagcccattgtagttgcgatagccgagacaacaccttacaagtggatatcaatggctttaccactggtcgcaggggggatctggcgaccattcacggcatgaaccggccgttcctcctcttgatggctactcccctggaacgggcccagcatctccagagttccagacataggcgagcgcttgataccaactattgtttttcttccactgaaaaaaactgctgcgtgcgccaactctacattgattttaggaaggatctcggttggaagtggatccatgagccgaagggctatcacgccaacttttgtttggggccatgtccgtatatttggagtcttgacacccaatactcaaaggttctggcactttataatcagcataatcctggtgctagtgctgctccctgctgcgtgccccaggcccttgagcccctgcccattgtttattacgtcggcagaaagcccaaggtcgagcagctgagcaatatgatcgttcggagctgcaaatgcagc

SEQ ID NO: 20133 - DNA, 1236 bp, synthetic construct
  misc_feature 1..1236: note = source = /note="Description of Artificial Sequence: Synthetic coding sequence"
  source 1..1236: mol_type = other DNA
atgaagatgcatttgcagagagctctggtagtattggctcttctgaatttcgccaccgtgtccctgagcctctcaacttgtactacactggatttcggacacatcaagaagaaaagggtggaggccatcagaggacaaatattgtcaaaactccgtttgacttcacctcccgaacccactgtcatgacacatgtgccctatcaggtcctcgctctgtacaattccactagagagttgctcgaggaaatgcatggcgagcgcgaggagggctgtacacaagaaaacaccgaatccgaatattacgccaaggagattcataagtttgatatgattcaaggactggctgagcacaatgaactcgctgtgtgtccaaagggaatcacatctaaagtgtttaggttcaatgtctctagcgttgaaaagaaccgtactaacttgttcagagctgagttccgcgtgctccgcgtgcctaaccctagttcaaagagaaacgagcaacgcatcgagctctttcaaatcctgcgccctgacgagcacatcgccaagcagcgttacatcggcggtaaaaatctccccacacgtggaacagctgaatggttgagtttcgacgtcactgacaccgtccgtgaatggctgctgcgccgtgaatctaatcttggcctcgagatctcaattcactgcccctgtcataccttccaacccaatggagatattttggagaatatccatgaagtgatggagatcaagtttaagggcgtggacaacgaggacgatcacggcaggggagatctcggtagattgaagaagcagaaagatcaccacaacccacatctcatcctcatgatgatccctccacatcgcctggataaccctggccagggcggccagagaaagaagcgtgccctggacaccaactactgtttcaggaatctcgaggagaattgctgcgtaagacctctctatattgattttaggcaggatctgggctggaagtgggtgcacgaacctaaaggttactacgccaatttctgctctggcccatgcccctacctgcgctcagctgatactactcactccacagtccttggcctgtacaatactctcaatcctgaggcctcagcctcaccctgctgcgtgccacaggacttggagccactgaccatcctctattacgttggacgcacccccaaggtcgaacagctctccaatatggttgtaaagtcttgtaagtgctct

SEQ ID NO: 20134 - DNA, 1236 bp, synthetic construct
  misc_feature 1..1236: note = source = /note="Description of Artificial Sequence: Synthetic coding sequence"
  source 1..1236: mol_type = other DNA
atgaaaatgcacttacaaagggctctcgtcgtacttgccttgctcaatttcgccacagtcagcctgtccctgtcaacgtgcaccacgctggacttcggtcatattaagaaaaagcgggtggaggcgattagaggtcagatcctgtccaagctgaggttgacttctcctccggaaccaacagtaatgacacatgtaccctatcaggtcctcgccttatacaactctacccgcgagctcctagaggagatgcatggtgaaagggaggagggttgtacgcaggagaacacagagtccgagtattacgctaaggaaattcacaagtttgacatgatacagggcctggcagagcacaatgagctggctgtgtgccctaagggtatcacatctaaggtgtttcgctttaatgtgagttctgtagagaagaaccgcacaaacttattccgcgccgaatttagggtacttcgagtccctaatccatccagcaaacgcaacgagcagcgcatcgagctgttccagatccttcggcccgatgagcacattgccaagcaaagatatatcgggggcaagaatctgcctacccgcggaacagctgagtggctgagcttcgatgtcacagacacggtgcgggagtggctccttcggcgggaatccaatttgggactagaaatctcaatccactgcccctgtcacacgtttcagcccaacggagatatactggaaaacattcatgaagtgatggaaattaagtttaagggagtggataatgaagatgatcacggacggggggacctagggagactgaagaaacagaaggaccaccacaacccccacctgatcttgatgatgatcccgccccacaggctcgacaatccaggccaaggtggtcagaggaaaaaacgcgccctcgacacaaactattgctttagaaacctggaggagaactgttgcgtgcgcccgctctacatagatttcagacaggacctgggatggaagtgggtgcatgagcccaaaggctattatgctaacttttgctccggaccttgtccatatcttcggtctgccgatactacccatagcaccgtgctcggcctgtataacaccctgaacccagaggctagcgcctccccatgctgcgtgccccaggaccttgaacccttgacgattctctactatgtcgggcgaaccccgaaggtggaacaactgtctaatatggtggtcaagtcttgtaagtgttcg

SEQ ID NO: 20135 - DNA, 1236 bp, synthetic construct
  misc_feature 1..1236: note = source = /note="Description of Artificial Sequence: Synthetic coding sequence"
  source 1..1236: mol_type = other DNA
atgaaaatgcaccttcagcgggcccttgtggtcctggcgttacttaacttcgcgactgtgtccctgagcctatctacatgtactacactcgattttggtcacattaaaaagaaacgagtcgaagcaataaggggccaaatcttgtccaaacttcgcttgacgtcacccccggagccaactgtgatgacccacgtgccatatcaggttctagccttgtacaactccacgagagagctcctggaggagatgcatggggaacgggaggagggatgcactcaggagaataccgagagtgagtattatgcgaaggaaattcacaagttcgacatgattcaggggctggcagagcacaacgagctggctgtttgccctaaggggatcactagcaaagttttcagattcaacgttagttcagtggagaaaaatcgtaccaacctcttccgggctgagtttcgtgtgctgagagttcctaatccaagtagcaagagaaatgagcagagaatcgagctgtttcagattctgagacctgatgagcatatcgcgaagcagcgctacattggaggcaaaaacctgccaacccggggcactgcagaatggctttccttcgatgtaacggataccgttcgtgaatggctactaaggcgggaatctaacctgggcctggaaatcagcatccattgcccgtgccatacctttcagccaaatggggacatcttagagaacatccacgaggtcatggaaatcaaattcaagggcgtggataacgaagacgatcacggcagaggcgatttgggcagattaaagaaacagaaggaccaccataacccgcacctgatactgatgatgatccccccccaccgcctggacaaccctggacagggtgggcagcggaaaaagagggccttggacactaactattgcttccgcaacttggaagagaattgctgtgttagaccactgtatatcgacttccgccaagatcttggctggaaatgggtacacgagcccaagggttattatgcaaacttttgctccggaccatgtccttacctccgttccgctgatactacccacagcactgtcctcggcctgtacaacaccctcaacccagaagccagtgcctcaccctgctgcgtcccccaagacctggaaccactcacaattctttactacgtgggacggacaccaaaagtcgagcagctgagcaacatggtggtaaagtcttgcaagtgtagt

SEQ ID NO: 20136 - DNA, 1236 bp, synthetic construct
  misc_feature 1..1236: note = source = /note="Description of Artificial Sequence: Synthetic coding sequence"
  source 1..1236: mol_type = other DNA
atgaagatgcatctgcagcgggcgctggttgttctcgccctccttaacttcgccaccgtgagcctatctctgagcacctgtaccaccctcgactttggtcacattaagaagaagcgcgttgaggccattcgcggccaaatcctatccaagctgcgcctaacctcacctcccgagcccactgtcatgacacacgtcccatatcaagttctcgccctttataactcgacccgtgaactgctggaggagatgcatggcgagcgtgaggaaggctgtactcaggaaaacactgagagcgagtactacgcaaaagaaatccataagttcgatatgatccagggccttgcggagcacaacgagctggccgtctgtccaaagggaatcactagtaaagtgttccgttttaatgtttccagtgtggagaagaaccgcacgaacctcttccgtgcggagttccgtgtgcttcgcgtacctaacccatccagcaagcggaacgagcaacgcattgagcttttccaaatccttcgtcctgacgagcatatcgcgaagcagcgttacatcggcggtaagaacctgcctactcgcggtacagctgagtggctgtctttcgacgttacggatacggttcgagagtggctgttgcgtcgcgagtcgaatctggggctcgagattagtatccactgcccttgccacacttttcagcccaacggcgacatcttggagaatatccatgaggtaatggaaattaagtttaagggggtcgataacgaagacgaccatgggcgcggggatctgggtcgactcaagaagcagaaggaccaccacaacccgcacctcatcctcatgatgattccgccccaccgtcttgacaaccctggtcaaggaggtcaacgcaaaaagcgcgcgctggatactaactactgcttccggaacctggaggagaattgctgcgtgcggcccctctacatcgattttagacaggatctcggctggaagtgggtccatgagcctaagggttactacgccaacttctgcagcggcccctgcccctatttgcgttctgccgacacgacccacagcaccgtccttggcctttacaacactctcaacccggaagcttcggctagcccctgttgcgtgccacaggatctcgagccgctgaccatcctttattatgtgggccggactcctaaggtggagcagttgagcaacatggtggtgaagtcctgcaagtgcagt

SEQ ID NO: 20137 - DNA, 1236 bp, synthetic construct
  misc_feature 1..1236: note = source = /note="Description of Artificial Sequence: Synthetic coding sequence"
  source 1..1236: mol_type = other DNA
atgaaaatgcatcttcaacgtgccttggtggtgttggccctgctaaactttgctacagtaagcctgagcctgagcacctgcactacccttgacttcggacatattaagaaaaagagggtcgaagctattaggggccagattcttagcaaattaaggctgaccagcccacctgaaccgacagttatgacacatgttccctaccaggtgttggcactgtacaatagcacaagagaactgcttgaggagatgcatggggaaagggaggagggctgtacccaggaaaacacggagtctgagtattatgccaaagaaattcacaaatttgatatgattcagggcctcgcagaacataacgagctcgctgtctgcccaaaaggcattacatcaaaggtctttcgctttaacgtgtcatccgttgagaagaacaggaccaacctgttccgagcggagtttagggtactccgcgtgccaaatccatcctctaagaggaacgagcagaggattgaactgttccagatactgaggcccgacgagcacatagccaaacagagatatattggtggcaagaatttgcccacaaggggaaccgccgaatggctgtcatttgacgtcactgacacagtgcgagagtggctgctcaggagggaaagcaatctcggccttgaaattagtatccactgcccatgtcacactttccagcccaatggcgacattctggagaatatacacgaggtgatggagattaaattcaaaggggtggacaacgaagatgaccacgggcgtggtgatctagggcggctgaaaaagcagaaggatcaccataatccccacctaattctgatgatgattcctccacacaggttagacaatccaggccagggtgggcaaaggaaaaagcgggccctcgacaccaactactgctttagaaacctggaggagaattgctgcgtgcgacctttatatattgattttagacaagacctgggctggaagtgggtacatgagcctaagggctactatgccaacttttgtagcgggccttgcccttacctcagatctgctgataccactcacagtacagtcttaggattatacaatactctcaaccccgaggcttctgcatctccctgttgcgtaccgcaggaccttgagccattgaccatcctatattatgtgggcaggacccccaaggtagaacagctgagcaatatggtggtcaaatcctgcaagtgcagt

SEQ ID NO: 20138 - DNA, 1236 bp, synthetic construct
  misc_feature 1..1236: note = source = /note="Description of Artificial Sequence: Synthetic coding sequence"
  source 1..1236: mol_type = other DNA
atgaaaatgcacttgcaacgagcactcgtggtgcttgcattgcttaacttcgccaccgtgtcactttccctgagcacttgcactaccctcgattttggacacataaagaaaaagcgtgtcgaggcgattagaggacagatcctttcgaagctgagacttaccagcccacccgaaccaaccgtgatgactcacgtcccttatcaagtccttgccctctacaatagtacccgagagctgcttgaggaaatgcacggagaacgtgaagaaggatgtactcaggagaacactgaatcagaatactacgcaaaggaaattcacaaattcgatatgattcaaggacttgcagaacacaatgagcttgccgtctgtccgaagggaattacttcaaaggtgtttcgattcaacgtctcatccgtggagaaaaacagaactaacctgttccgggcagagttcagagtgcttagggttccgaatccctcttccaaacggaacgaacaaaggattgaactttttcagattctcagaccagatgaacatatagcgaagcagagatacattggagggaagaatctgccaaccagaggcactgcagaatggctctcctttgatgtgaccgacaccgtccgtgaatggctgctcagaagggagtccaatcttgggcttgagatttcgatacactgtccatgtcatacctttcaacccaacggtgacattcttgaaaacattcatgaagtcatggaaatcaagtttaaaggagtggacaatgaggacgatcatggaagaggtgacctgggtagactgaaaaaacagaaggatcatcataatcctcacctcattctcatgatgattccaccccaccgacttgataaccccggccagggaggacaacggaaaaaacgggcactggataccaattactgttttcggaacctggaggaaaattgttgcgtgcggcctctttacattgacttcagacaagatctcggatggaagtgggtgcatgaaccaaaaggttactacgccaatttctgtagcggtccatgtccgtacctgagaagcgcagatactacccatagcaccgtcctgggactgtacaacacccttaaccctgaagcatcggcatccccttgctgtgttcctcaagatctcgaacccctgaccatattgtattacgttgggcgcacgcctaaggtggaacagctgtcaaacatggtggtgaaatcatgcaagtgtagc

SEQ ID NO: 20139 - DNA, 1236 bp, synthetic construct
  misc_feature 1..1236: note = source = /note="Description of Artificial Sequence: Synthetic coding sequence"
  source 1..1236: mol_type = other DNA
atgaaaatgcatctccagagagcactcgtcgtgctggcactgctgaacttcgccacagttagcctgagcctgagcacttgcacaactctggacttcgggcacataaaaaaaaagcgggttgaggccattcgtggccagatactgtcaaagctgcgccttacaagtccacccgagcccacagtgatgactcacgtaccataccaagtgctcgctctgtacaatagtactagagagctactagaagaaatgcacggtgaacgggaggaaggatgtacacaggaaaatacagagtctgagtactacgctaaggaaatccacaaattcgatatgattcaggggttagccgagcacaatgagctagctgtctgtcccaagggcatcaccagtaaagtcttccggttcaatgtttccagtgtcgagaagaaccggaccaacttatttagggctgaattccgagtgctgcgcgtgcccaatcctagttctaagcgaaacgagcagcgtattgagctatttcagattctcagacctgacgagcatatcgccaagcaaagatatattggcgggaaaaacctgcccacaagagggaccgcagaatggctgagcttcgacgtgaccgacactgtacgggagtggctgctgcgacgcgaaagcaatctgggcttagaaatctccatacattgtccatgtcacacattccaacccaacggcgacatcctggaaaatatccatgaggttatggagatcaagtttaagggagtggacaacgaggacgaccacggccggggcgatctgggacgcctaaaaaagcagaaagaccatcacaatcctcacctgatactgatgatgatccctcctcacaggctggacaatcccgggcagggaggacaaaggaagaagcgtgcattagataccaactattgcttccgcaatctggaagaaaactgctgcgtcaggcctctgtacatagactttcggcaagacctcggctggaagtgggtgcacgagccaaaggggtactacgcaaacttctgttcaggcccctgtccttacttacgcagcgccgacaccacccacagtaccgtcctcggcctatacaacaccctgaacccagaggccagtgcaagcccatgttgtgtccctcaagatctggagccactcaccatactctattatgttgggagaactccaaaggtggagcaattatctaatatggtggtgaagagctgcaagtgcagt

SEQ ID NO: 20140 - DNA, 1236 bp, synthetic construct
  misc_feature 1..1236: note = source = /note="Description of Artificial Sequence: Synthetic coding sequence"
  source 1..1236: mol_type = other DNA
atgaagatgcacctccaacgggcccttgttgtgctcgccctcctgaatttcgcgaccgtctcgctgtcgttatccacctgcactaccctcgactttggtcacataaagaaaaaacgcgtggaggcaatccgaggacagatcctgtccaagcttcggctcacatcccctccagaacccactgtgatgacacacgtaccctatcaggtgctggctctctacaattctactagggaactgttggaggaaatgcacggcgaacgcgaggaggggtgcacgcaagagaacaccgaatctgagtactacgccaaggaaatacataagtttgacatgatccagggcctggctgagcacaatgagcttgcagtgtgcccgaaaggcattacgagcaaggtcttccgctttaatgtaagttcagtggagaagaatcgtaccaacctgttcagagccgaatttagggttctgcgcgtgcctaacccttcttcaaagcgcaacgaacaaagaatcgaattgttccagatcttgaggccagatgaacatattgccaagcagagatatatcgggggaaagaatttgcccacaagaggcactgctgaatggctaagtttcgatgtgaccgataccgttcgcgagtggctgctaaggagggagtcgaatcttggattagaaataagcattcattgtccgtgccatacatttcaaccaaatggtgatatcttagaaaatatccacgaggtcatggaaatcaaatttaagggggttgataacgaggacgatcatggcaggggggacttgggacgattaaaaaagcagaaggaccatcataacccacaccttattctgatgatgataccaccccaccgactggacaaccccggccaaggaggtcagcgaaaaaagagagctcttgataccaattactgctttcggaatctggaggagaactgttgtgtccggcccttgtacattgatttcaggcaggatctgggctggaagtgggttcatgagcctaaaggctactacgcaaacttttgtagcggcccatgtccatatttacgatctgcggacacaacacactccacagttctggggctttacaacaccctcaatccggaggcaagcgcaagcccttgctgcgtcccacaggatttagaaccactgactattctgtactacgttgggagaacaccgaaggtcgagcagctgtccaatatggttgttaagtcttgcaagtgttcc

SEQ ID NO: 20141 - DNA, 1236 bp, synthetic construct
  misc_feature 1..1236: note = source = /note="Description of Artificial Sequence: Synthetic coding sequence"
  source 1..1236: mol_type = other DNA
atgaaaatgcacctgcagcgcgccctcgtcgtgctcgccttgctgaactttgccactgtcagtctgtctcttagcacgtgtactaccctggacttcggccatataaagaagaagagggtcgaggctattagaggccaaatactgagtaagctgcgacttactagtcctcctgaacctaccgtcatgactcatgtaccataccaggttcttgctctatataatagcacaagagagctccttgaggagatgcatggcgaacgtgaagaggggtgtacccaagaaaatactgagtccgagtactacgccaaagagatacacaagtttgatatgatccaggggctcgcagagcacaacgagttggccgtttgtccaaaggggatcacctcaaaggtgttccgatttaacgtgtcttcagtggaaaaaaaccggacgaacctgttcagagccgaatttagggttctacgagtgcccaatccaagcagtaagcgaaacgagcagagaattgaactgttccagatcctacgacctgacgagcacattgccaaacaacggtacataggcggcaaaaacctgccaactaggggcaccgccgaatggttatctttcgacgtgaccgatacagtcagggagtggttgctgaggcgggaatccaacttgggactggaaatctccattcactgtccctgccacacttttcagccgaatggtgatatcctggaaaacattcatgaggtgatggaaattaagttcaagggagtcgacaacgaggatgatcacggaaggggagaccttggaagactgaagaagcagaaggaccaccataatccccacctaattctcatgatgatacctcctcatcggctcgacaatccaggccaaggaggacaacgcaagaagcgtgctctggatacgaactactgctttcgaaacctcgaagagaattgttgtgtgaggcctctgtacatagactttcgacaagacctagggtggaaatgggtgcacgaacctaagggatattatgccaacttctgtagcggcccatgtccgtatctcaggagcgctgacaccactcacagcacagtactgggactgtataatacgctcaacccagaagctagtgcaagcccatgctgcgtgccacaggacctggaaccactaacgatactctattacgtggggcggacaccgaaagtcgagcagctgagcaacatggttgtgaaaagctgcaagtgctcc

SEQ ID NO: 20142 - DNA, 1236 bp, synthetic construct
  misc_feature 1..1236: note = source = /note="Description of Artificial Sequence: Synthetic coding sequence"
  source 1..1236: mol_type = other DNA
atgaagatgcacctgcagagagccctcgtggtactggccctgttgaattttgctacagtgtccctgtcactgagcacctgcaccacactcgactttggtcatatcaaaaagaaaagggtggaagccattaggggccaaatcctgtccaaattgcgccttacttcaccccctgaacctaccgtgatgactcacgttccatatcaagtcttggctctgtataacagcacgcgcgagcttctggaagagatgcatggtgaaagggaagaaggatgtacacaagaaaatacagaatcagagtattatgcgaaagagatccacaaattcgatatgattcaaggcctggcagagcacaacgagctggccgtatgtcctaaaggcattacttccaaggtgttcaggtttaacgtatcaagcgtggaaaagaaccgcaccaacctcttcagggcagagttcagagtacttagggtgccaaacccttccagtaagaggaacgagcagaggattgaactctttcagatcctgagacctgacgaacatatcgctaagcagcgctacatcggtggcaaaaacctccctacacgcggtacagcagagtggctctccttcgacgtcacagataccgtgcgcgagtggctgctgaggagagagagcaacctgggcctggaaatatctatacattgtccttgtcacactttccaacctaacggcgatattttggagaacatccacgaagtaatggagatcaaattcaagggcgtggacaacgaggatgaccacggcagaggcgatctgggacgccttaaaaagcagaaggaccaccataacccccatcttatattgatgatgatacccccccacagactggataatccgggtcagggcggccagagaaaaaaaagggccctggatacaaactactgtttcagaaaccttgaggagaactgctgcgttagacctctttatatcgatttccgccaagacctgggctggaagtgggttcacgaacctaaaggttactacgccaatttttgctctggaccatgtccatacctgaggtcagctgacacaacacattcaaccgttttgggtctgtacaacactttgaacccagaggctagcgcttcaccgtgttgtgtccctcaagacctcgagccattgaccatactttactatgttggaaggacacctaaagtcgagcaactctccaacatggtagtgaaatcatgcaagtgttct

SEQ ID NO: 20143 - DNA, 1236 bp, synthetic construct
  misc_feature 1..1236: note = source = /note="Description of Artificial Sequence: Synthetic coding sequence"
  source 1..1236: mol_type = other DNA
atgaagatgcatttgcagagggcactggtggtgctggctttgctcaacttcgctaccgtgtccctttccctgtcaacttgcaccacgctggatttcggtcatatcaagaagaagcgtgtggaggcgattcgagggcagatcctgtccaagctccgcctcacttccccacctgagcctaccgtgatgactcacgtgccgtaccaggtgttggcattgtacaactcgaccagagaacttctggaagaaatgcacggtgaaagggaggagggctgtactcaggaaaataccgaatcagaatactacgcaaaagagattcataagtttgacatgattcaaggactggcggagcataatgaactggcagtgtgccctaaaggtattacctccaaggtgtttaggtttaatgtgtcgtcagtggagaaaaatcggactaacctgtttcgagctgaattccgtgtgctgagggtccccaatccatcttcaaagagaaatgagcaacggattgagctgtttcagattcttagaccagatgagcacattgcgaaacagcgttacattggaggcaagaatcttcctaccaggggaactgcggaatggctcagcttcgatgtgacggatactgtgagagagtggctgctgagaagagaaagcaacctgggactggaaatctcaatacattgtccctgtcatacttttcaaccaaacggagacatcctcgaaaacatccatgaagtgatggagattaagtttaagggagtcgacaacgaagatgaccatggtaggggtgaccttggcagacttaagaagcagaaggaccatcacaacccacatctgattttgatgatgatcccccctcatagacttgataacccaggacaaggcggtcagagaaaaaagcgggcacttgatactaactattgtttccgcaacttggaagaaaactgttgcgtacggcctctctacattgactttcgacaagatttggggtggaagtgggtccacgagcccaagggttactatgcaaatttctgttcgggtccttgcccatacctccgttctgccgacactacccattcaaccgtgctgggactttacaacacgttgaacccagaagcatcggcatcgccctgctgtgtgccgcaggaccttgagccactcaccatactgtactacgtcggtcgaactcccaaggtggagcagctcagcaacatggtcgtgaagtcctgtaaatgttcg

SEQ ID NO: 20144 - DNA, 1236 bp, synthetic construct
  misc_feature 1..1236: note = source = /note="Description of Artificial Sequence: Synthetic coding sequence"
  source 1..1236: mol_type = other DNA
atgaagatgcacctgcagagggccctggtggtgctggccctgttgaatttcgccactgtctcactgtcgttgtccacctgcaccacgttggacttcggtcacatcaaaaagaagcgagtggaggctatcagagggcagatcctgtccaagctcagactcacttccccaccggaaccaacggtcatgacccacgtgccgtaccaggttctcgcgttgtacaattcaactcgcgaactgctggaggaaatgcacggcgagcgcgaggagggctgtactcaagagaacaccgaatcggagtactacgccaaagaaatccacaagtttgacatgatccaggggctcgcggagcataacgaactcgctgtgtgcccaaagggcataacttccaaggtgttccggtttaacgtctcgagcgttgaaaagaacagaactaacctcttccgggctgaattccgcgtcctgagggtcccgaacccatcctcgaaacgcaatgaacagcggatcgaattgtttcaaatcctcagacccgacgaacacatcgcaaagcagagatacatcggaggaaaaaacttgcctacgcggggaaccgcggaatggctctcattcgatgttaccgatacggtccgggagtggctgctgaggagggaatcaaatttgggactcgaaatctctattcattgcccgtgtcacactttccagccgaatggcgacatcctcgaaaacatccacgaggtgatggaaatcaagttcaagggagttgataacgaggacgaccacggacgcggggatctgggcagactgaagaagcagaaagatcaccataacccccacctgatacttatgatgattccgccacacagattggacaacccgggacagggcggacagagaaagaagagagcgctggacactaactactgtttccgcaatttggaggagaactgttgtgtgaggcccctttacatcgacttccgccaggacctgggatggaagtgggtgcatgagcctaaggggtactacgcgaacttctgctccggaccgtgcccatacctccgcagcgccgacaccactcattccaccgtgcttggcctgtacaacactctgaaccccgaagcatcagctagcccatgttgcgtcccacaggatctcgagcctttgaccattctgtactatgtcggtaggacccctaaggtcgagcaactgtccaatatggtggtgaagtcatgcaagtgctcg

SEQ ID NO: 20145 - DNA, 1236 bp, synthetic construct
  misc_feature 1..1236: note = source = /note="Description of Artificial Sequence: Synthetic coding sequence"
  source 1..1236: mol_type = other DNA
atgaagatgcacctccagcgggccttggtcgtgcttgcacttctgaactttgcaacggtgtcgctgagcctttcgacttgtaccactctcgactttggacacattaagaagaaaagggtggaagcaatccgaggccagatcctctcgaagctcagacttacctcgcctcctgagccaaccgtgatgacccatgtcccgtaccaagtcctcgccctttacaacagcacccgagagttgcttgaagaaatgcatggcgagagagaggaaggatgtactcaggaaaatacggaatctgaatactacgcaaaggaaatccataagttcgatatgatacagggactggctgaacataacgagctcgcagtctgcccaaagggtataactagcaaagtgtttcgattcaacgtgagctcggtggaaaagaatagaacgaacctgtttagagcagaattcagagtgctgcgtgtgcctaatccatcgagcaaaagaaacgaacagcgaattgaactgtttcagatacttcggccagatgaacacattgcgaaacaacgctacataggtggaaagaatctgccgacccggggtactgcagagtggctgtcgtttgatgtgaccgacactgtgcgagagtggctcctgcggcgggaatcaaatcttggattggaaatttcgatccattgtccatgccacacttttcaacctaatggtgatattctcgaaaacatccacgaagtcatggagattaagttcaagggagtcgacaacgaagatgatcacggtcggggagatttgggcaggcttaagaagcaaaaagatcatcacaacccacaccttattctgatgatgattccccctcatcgccttgacaacccaggccaagggggccaacgcaagaagagagcgcttgacactaactactgttttagaaacctcgaagagaactgttgtgtaagaccgctttacatcgactttcgtcaagatctcggatggaagtgggttcacgaaccgaaagggtactacgcgaacttttgctcggggccctgtccttaccttcgttcagctgacacgacccattcgaccgtgcttggactttacaataccctcaaccctgaagcaagcgcctccccttgttgtgtccctcaggatctcgaaccactgactattctgtactacgtgggcaggactcctaaggtggaacagctttcgaacatggtggtgaagtcatgtaagtgctcc

SEQ ID NO: 20146 - DNA, 1236 bp, synthetic construct
  misc_feature 1..1236: note = source = /note="Description of Artificial Sequence: Synthetic coding sequence"
  source 1..1236: mol_type = other DNA
atgaagatgcatctacaaagagctcttgtggtgctcgcgttgttaaatttcgctacagtttcactatcactatccacgtgcacgaccctggatttcggtcacattaaaaaaaaaagagtcgaggcaatacgaggacagatactatctaaactccgccttacgtccccccccgagcctaccgtaatgacacatgtgccttaccaggtcctggctctatacaacagtacacgcgagctgctggaggagatgcacggcgaacgtgaggagggttgtacccaggagaacaccgagtctgaatattacgccaaggagatccacaaattcgatatgattcagggtctggcggagcacaatgaactggctgtgtgtcctaagggcatcaccagcaaagtgttccggttcaacgtctcctcggtggagaagaatcggactaacttgttccgggctgagttccgcgttttacgagtgccgaaccccagttcgaagcggaacgagcaaaggattgagctattccaaattctccgacctgatgaacacatcgcaaagcagcgatacattggtggcaagaatcttcccacgcgcgggaccgctgagtggctttcattcgacgttactgacacggtacgcgagtggcttcttcgccgtgagtctaacctcggattagaaatttcgatccactgcccatgccacactttccagccaaacggggatatcttagaaaatattcacgaagtcatggagattaaattcaagggcgtcgacaacgaagatgatcatggaagaggtgaccttggccgactaaaaaagcaaaaggaccaccacaacccgcatttgattttgatgatgattccacctcacaggctggataatcccggccagggtgggcagcggaagaagcgagctctcgacaccaactactgctttcgcaaccttgaggagaactgctgtgtgcgccccctgtacatcgattttaggcaggatctgggctggaaatgggtacacgagcccaaaggatactatgccaatttttgcagcggcccctgtccttatcttcgctcagccgataccactcattccacggtgcttggtctgtacaatactctcaacccggaagcgtccgcatctccgtgctgcgtgcctcaggacctcgagcctctcaccatcctatattacgtgggtcgtacaccaaaagtggagcagttgtcaaacatggttgtcaaaagctgtaagtgctcc

SEQ ID NO: 20147 - DNA, 1236 bp, synthetic construct
  misc_feature 1..1236: note = source = /note="Description of Artificial Sequence: Synthetic coding sequence"
  source 1..1236: mol_type = other DNA
atgaaaatgcatcttcaaagagcattggttgtattggcattgctgaatttcgctacagtctcgttgtcgctgtctacatgtacaactctcgactttggccatatcaagaaaaaacgggtcgaggccattcgcggtcagatcctttccaagttgagactgacatcaccaccggagcccactgtcatgacacacgtaccgtaccaggttttagccttgtataacagcacacgggaactattagaagaaatgcacggcgaaagagaagaaggatgcacacaagagaatacagaaagcgaatactacgcaaaagaaattcataaatttgatatgatccaagggttagctgagcacaatgaactcgcagtgtgtccgaaaggcatcacatctaaggttttccgtttcaatgtgtcctctgtggagaaaaatcgtacaaatttatttcgggccgaattcagagttttacgtgtgccgaatccttcttcgaaacggaatgagcagcgaattgaactgtttcaaattttgagaccagatgagcatatcgccaaacaaagatacatcggagggaaaaatctgccaactagaggcacagcagagtggctttcttttgatgtgacggatacagtgagagaatggttgcttcggcgagaaagtaacctgggtttggaaatcagcattcattgcccttgtcatacgtttcaaccaaacggcgatattttagagaacatccacgaagttatggagatcaaatttaaaggggtggataatgaagatgatcatggcagaggagatctaggtagacttaagaagcagaaagatcatcacaatccgcacctaatcttgatgatgatcccgccgcacagacttgataatccgggtcaaggaggccagagaaagaagcgcgcgcttgatactaactattgtttccgcaatctcgaggagaactgttgcgtaagacctctttatatcgattttagacaggatcttggctggaagtgggtgcatgaacctaaaggctactatgccaatttttgtagcggtccgtgtccatatctgaggagcgcagacacgacgcacagcacagtactgggtttatacaacacacttaatcctgaagcatcagcgagcccctgttgtgttccccaggatttagagcctttaactattctttactatgttggtaggacgcctaaagttgaacagctgtctaatatggtcgttaaatcatgcaaatgctca

SEQ ID NO: 20148 - DNA, 1236 bp, synthetic construct
  misc_feature 1..1236: note = source = /note="Description of Artificial Sequence: Synthetic coding sequence"
  source 1..1236: mol_type = other DNA
atgaagatgcacttgcagagagctttggtggtcctcgctctacttaactttgccaccgtttccctttccctgagcacatgtacaacactagattttgggcacatcaagaaaaagagagttgaagccatcaggggccagatactcagcaaactacgccttacttccccacccgagcctacagtgatgacacatgtgccgtatcaagtcctggcactgtacaatagtaccagagaactgttagaagaaatgcacggcgagcgggaagagggctgcacacaagagaatactgagagtgagtattacgctaaagaaatccataagtttgacatgattcagggccttgctgagcacaatgagctcgctgtatgtcccaaagggattacatccaaggtgttcaggttcaacgtctctagtgtggagaagaataggaccaatctattccgcgcagagttccgagtactcagagtgccaaacccaagctccaagagaaatgagcagaggatcgagttgttccagatacttcgtcccgacgagcatatcgccaagcaacgttatattggcggcaagaaccttcccacccggggaactgcagagtggctgtcatttgatgttaccgacacggtgcgcgagtggctactgcggcgcgaatcaaacctgggtttagagatctcgattcactgcccttgccatactttccaacccaatggtgacattctggagaatattcatgaagttatggagatcaagttcaaaggtgttgacaatgaggacgaccacggaagaggagatctaggaagattaaagaaacaaaaggaccaccataaccctcacctcatactcatgatgattccaccgcaccggctagataaccctgggcaaggtgggcagcggaagaaacgtgcattagacaccaactactgcttcaggaatttagaagagaattgttgcgtaagacctctgtatatagatttcaggcaggacctggggtggaagtgggtgcatgagcctaagggctattacgcaaatttctgcagtggcccatgtccctatttgcggagtgcggacactactcattcaacagttttgggcttgtacaacacactgaacccggaggcgtccgcgagtccctgctgtgtcccacaggacttagagccgctcactatcctctattacgtcggaaggacacccaaggttgagcagttgtcgaatatggtcgttaaatcgtgcaaatgctcc

SEQ ID NO: 20149 - DNA, 1236 bp, synthetic construct
  misc_feature 1..1236: note = source = /note="Description of Artificial Sequence: Synthetic coding sequence"
  source 1..1236: mol_type = other DNA
atgaaaatgcatctacagcgagctctggtggtcctagccctcctgaactttgccacggtgagtctgtcactgtctacctgtacaacgcttgacttcgggcatatcaaaaaaaaaagagtggaggcaatcaggggacagattttaagcaagctgaggcttacctcgcccccagaacctaccgtgatgacacacgtgccgtaccaagttctggccctgtataactcgactagggagttactcgaggagatgcatggggaacgtgaggaaggctgcacgcaggagaatacagagagtgagtactatgctaaggaaattcacaagttcgacatgatccagggcttggctgaacacaacgaattagctgtgtgccctaagggaattactagtaaggtattccggtttaatgtaagcagtgtcgagaagaaccggacaaacctgtttagggccgagtttcgcgtgctgagggtgcctaacccttcatctaaaaggaacgagcagagaatagagctcttccagattctgaggccagacgagcacatagccaaacagaggtatatagggggcaagaacctccctactcggggcacagccgagtggctgagtttcgacgtgactgacaccgtccgagaatggctcttgagacgggagtccaatctcggcctggaaatcagcatccattgtccttgtcacacattccagcctaacggggacatactggagaacatccatgaagtgatggagattaagttcaaaggagtggataatgaggacgatcacgggaggggagatcttggcaggctgaagaaacagaaggaccatcacaatccccacctgatcctcatgatgatcccccctcaccggctcgataacccaggccaggggggccaaaggaagaagagggccctggacaccaattattgctttcgtaatcttgaagaaaattgctgtgtgcgacccctttacatagatttccgccaggacctaggttggaaatgggtgcacgaaccaaagggatactacgctaacttctgttccggaccttgcccatatctgaggagcgcagacactacacactcaacggtgctaggcctctacaatacactgaatccagaagcctccgcgtccccttgttgtgtcccccaagatctggaaccactaacgatcttgtattacgttggacgtacccccaaagtggagcaactgagtaacatggtggttaaatcttgcaagtgtagt

SEQ ID NO: 20150 - DNA, 1236 bp, synthetic construct
  misc_feature 1..1236: note = source = /note="Description of Artificial Sequence: Synthetic coding sequence"
  source 1..1236: mol_type = other DNA
atgaagatgcaccttcagcgcgctctggttgtcctggcactgctgaactttgccactgtgtcgctgtcattgtccacctgcacgaccctggacttcggacacatcaagaagaagagagtggaagccatcagagggcagatcctctcaaagttgcgattgacttcccctcccgagccgactgttatgacccacgttccataccaggtgcttgcgctgtacaactcgactcgagaactcctggaagagatgcatggagagcgggaagaaggatgcacccaggaaaataccgaaagtgagtattacgccaaggagatccacaaattcgatatgatccagggacttgccgaacataatgaactggctgtctgcccaaaggggatcacctcaaaagtctttaggttcaacgtgtcatcagtggagaaaaacaggaccaacctgtttcgagcagagttccgcgtattgagggtcccgaatccatcctcgaaacgcaatgagcagagaattgaactcttccaaatactgcggccggacgaacatatcgccaagcagcgctacatcggcgggaaaaacctgcctactcgcggcactgcggagtggctgtcgttcgatgtgactgatactgtcagggaatggctcctgagacgcgagtccaatttgggacttgaaatcagcattcactgtccctgtcatacttttcaacctaacggcgacattttggagaacatccatgaagtgatggaaatcaagttcaagggagtggataatgaagatgatcacggacggggagatctcggacgcctgaagaagcagaaagatcaccacaacccgcatctgatcctgatgatgatcccaccgcaccgccttgacaacccaggacaaggaggacaacggaaaaagcgggctctggacaccaattactgcttccggaacctcgaagaaaactgctgcgttcggccgctgtacatcgacttcaggcaggacctgggatggaaatgggtgcatgagccaaagggttactacgctaacttttgctcaggaccttgtccgtacctgcggagcgcggacacgacccacagcactgtgcttggcctctacaatactcttaacccggaggccagcgcctctccttgctgtgtcccccaggacttggaaccgctgacgatcctgtactacgtgggccggacgcctaaggtggagcaactgagtaacatggtggtgaagagctgcaaatgctca

SEQ ID NO: 20151 - DNA, 1236 bp, synthetic construct
  misc_feature 1..1236: note = source = /note="Description of Artificial Sequence: Synthetic coding sequence"
  source 1..1236: mol_type = other DNA
atgaagatgcacctgcagcgggccctggttgtcctcgccttgctgaatttcgccactgtctccctctcgctctctacttgcactactttggactttggacacattaagaaaaagcgggtcgaggccattcgcggacagatcctttccaaactgaggctgacctcgccccctgagccaactgtcatgacccacgtcccttaccaagtgctcgccctgtacaactctaccagagagcttctcgaggaaatgcacggcgaacgcgaagaaggatgcacccaggaaaatactgaatcagaatactacgccaaagaaatccacaaattcgatatgatccaggggctcgccgaacacaatgaactcgcagtgtgtcccaagggtatcacctccaaagtgttcagattcaatgtctcgtcagtcgagaagaacaggaccaacctgtttagagctgaattccgcgtgctgcgggtgccgaatccttccagcaagagaaatgagcagcgcatcgagctcttccaaatcctcagaccagacgagcacatcgctaagcagcgttacatcggaggaaagaaccttccgacgagaggcacggcggagtggctgtcgtttgatgtcactgatactgttcgcgaatggctgctgaggcgggagtcaaacctgggccttgagatttcgattcactgtccatgccataccttccagccaaacggagatatcctggagaacatccacgaagtcatggagatcaagttcaagggcgtcgacaatgaggacgatcacgggcggggtgacctcggacgcctcaagaagcaaaaggaccaccacaacccgcacctcattctcatgatgatcccgccacaccgcctggacaacccgggacaaggagggcagcggaagaagagagcactcgatactaattactgcttccgcaacctggaagaaaactgctgtgtccgcccgttgtacatcgatttccgccaggacctcggatggaagtgggtgcatgaaccgaagggatactacgctaacttttgttcgggtccgtgcccttatctgcggagcgcggacactacgcactcgactgtcctgggcctgtacaatactctgaacccggaggcttcggcctcaccatgctgcgtgcctcaagacctcgaaccactcaccattctgtactacgtgggacggactcccaaggtggaacagctgagcaatatggttgtgaagtcatgcaaatgctca

SEQ ID NO: 20152 - DNA, 1236 bp, synthetic construct
  misc_feature 1..1236: note = source = /note="Description of Artificial Sequence: Synthetic coding sequence"
  source 1..1236: mol_type = other DNA
atgaagatgcatctgcaaagggccctggtcgtgctggctttgctgaatttcgctaccgttagcctctcccttagtacttgcaccactctggattttggccatatcaagaagaagcgggtagaggctattcgcggtcagattctttcaaagctccgactgacatccccgccagagccgacagtcatgacccatgtcccataccaggtactggcactctacaattccacaagagagctcctcgaagaaatgcacggcgagcgagaagaagggtgcacgcaagagaataccgagtcagaatactatgcgaaggagatccataaatttgacatgattcagggattggccgagcacaacgaacttgccgtttgtccgaaagggatcacgtccaaggttttccgatttaacgtctcctccgtagagaaaaaccgaactaacctgtttcgggctgagttcagagtgctgcgagtgcctaacccctcatccaagcggaacgaacagcgaatcgaactgttccagatactgcggcccgatgagcatattgctaagcagagatacattggtggaaagaatctgcccactagagggactgccgaatggctgagcttcgatgtgactgacacagtgcgagagtggttgctgagaagagaaagcaatttggggctggagatctccattcactgcccatgccacacctttcagcccaatggtgatatcctggagaacatacacgaggtcatggagataaagttcaaaggtgttgacaacgaggacgaccacggccgcggagacttgggccggcttaaaaaacagaaggatcatcataatccccacctcattttgatgatgatccccccgcacagactcgacaacccgggccagggcggccagcggaagaagagggctctcgataccaattattgttttcgcaacttggaagagaattgttgtgttagaccgctgtatatagacttccggcaagacctcggatggaaatgggtccatgagccaaaagggtactacgctaatttttgttccgggccctgcccttatctgaggtcagccgacaccactcatagcaccgtactgggcctttataacactttgaaccccgaggcttctgcaagcccgtgctgtgtgccccaggatttggaacctctgaccatcctgtattatgtcgggcgcacaccaaaggtggaacaacttagtaatatggtggtgaagtcctgcaagtgcagt

SEQ ID NO: 20153 - DNA, 1236 bp, synthetic construct
  misc_feature 1..1236: note = source = /note="Description of Artificial Sequence: Synthetic coding sequence"
  source 1..1236: mol_type = other DNA
atgaagatgcatttacagcgggcgcttgtggtgttggctcttctgaacttcgctacggtgtcgcttagtctgagcacctgtacaaccttggactttggccatatcaaaaagaaacgggtcgaggccattcgtggccagattttgtcgaaactcaggcttacaagtcccccagaacctactgtcatgactcatgtgccctaccaggtgctggctttgtacaactctacccgcgagctgctggaggagatgcacggtgagagagaggagggttgtacgcaggagaatacggagtctgaatattatgccaaggagatccacaagtttgatatgatacagggactggccgagcataatgaactggcggtctgccctaaaggcattacttcaaaagtcttcagattcaacgtgagttcagtcgaaaagaaccgaacgaacctctttagggccgaattccgagtgctccgcgtccccaacccctcctcaaaaagaaacgagcagagaattgagctctttcagattctcagacctgacgagcacattgcgaaacagaggtacattggagggaaaaacctacccaccaggggaaccgcggaatggctgtctttcgacgtgactgacaccgtccgagagtggctattgagaagagaatcaaacctagggcttgaaatcagcatacattgtccttgtcacacctttcagccaaacggggacatcctcgaaaatatacatgaggtcatggagatcaagttcaagggtgttgacaacgaagacgaccacggccgcggcgacctcggtagactcaaaaagcagaaagatcatcacaatccgcatctgattttgatgatgatacctccccatagactagacaatccgggccagggcgggcaaaggaagaagagagccctggacaccaactactgcttcaggaacctcgaggagaactgttgtgtccgtccactttatattgattttcggcaggacctcggatggaaatgggtgcacgaaccgaagggctactacgcaaatttctgtagcggaccttgtccctacctgcgcagcgccgacacgacacattccacagtattgggtctctacaacacgctcaaccctgaagccagcgcatcgccatgttgtgtgccacaagacctggagccgttgactatcctgtattacgtggggcgcactcctaaggtagaacagctgagtaatatggtagttaagtcttgtaaatgcagt

SEQ ID NO: 20154 - DNA, 1236 bp, synthetic construct
  misc_feature 1..1236: note = source = /note="Description of Artificial Sequence: Synthetic coding sequence"
  source 1..1236: mol_type = other DNA
atgaaaatgcatctacaacgtgcgctagtagtattagcgttattaaattttgcgacggtatcgttatcgctatcgacgtgtacgacgttagattttggtcatataaaaaaaaaacgagttgaagcgatacgtggtcaaatactatcgaaattacgattaacgtcgccgccggaaccgacggtaatgacgcatgtaccgtatcaagtattagcgttatataattcgacgcgtgaactattagaagaaatgcatggtgaacgagaagaaggttgtacgcaagaaaatacggaatcggaatattatgcgaaagaaatacataaatttgatatgatacaaggtctagcggaacataatgaattagcggtatgtccgaaaggtataacgtcgaaagtttttcgatttaatgtttcgtcggtagaaaaaaatcgtacgaatttatttcgtgcggaatttcgtgttttacgtgtaccgaatccgtcgtcgaaacgtaatgaacaacgtatagaattatttcaaatattacgtccggatgaacatatagcgaaacaacgatatataggtggtaaaaatttaccgacgcgaggtacggcggaatggttatcgtttgatgttacggatacggttcgtgaatggctattacgtcgtgaatcgaatttaggtttagaaatatcgatacattgtccgtgtcatacgtttcaaccgaatggtgatatattagaaaatatacatgaagtaatggaaataaaatttaaaggtgttgataatgaagatgatcatggtcgtggtgatttaggtcgtctaaaaaaacaaaaagatcatcataatccgcatctaatattaatgatgataccgccgcatcgtttagataatccgggtcaaggtggtcaacgtaaaaaacgagcgctagatacgaattattgttttcgaaatttagaagaaaattgttgtgttcgtccgttatatatagattttcgacaagatttaggttggaaatgggttcatgaaccgaaaggttattatgcgaatttttgttcgggtccgtgtccgtatctacgatcggcggatacgacgcattcgacggtattaggtttatataatacgttaaatccggaagcgtcggcgtcgccgtgttgtgttccgcaagatctagaaccgttaacgatactatattatgtaggtcgtacgccgaaagtagaacaattatcgaatatggtagtaaaatcgtgtaaatgttcg

SEQ ID NO: 20155 - DNA, 1236 bp, synthetic construct
  misc_feature 1..1236: note = source = /note="Description of Artificial Sequence: Synthetic coding sequence"
  source 1..1236: mol_type = other DNA
atgaaaatgcatctgcagagggcattggtggtcttagccctcctcaatttcgcaaccgtgtcactgtccttgagcacctgtactaccctcgacttcggacatattaaaaagaagcgtgtcgaggcaatcaggggccagattctctcaaagctgagattaacttctccccctgaaccgaccgtgatgactcacgtcccttatcaggtcctggccctgtacaacagcaccagagaattactcgaagaaatgcacggtgagcgtgaggagggttgtacccaggaaaacacagagtccgaatactacgcaaaggaaatacataagttcgatatgatccaagggttagcggagcacaatgaattggcagtgtgccccaaaggcatcacttcgaaagtgttccgctttaatgttagttccgtggagaagaataggaccaacctgtttcgtgccgaattcagggtcttaagggtgcccaatcccagttcaaagaggaatgagcagaggatagaactgtttcaaatcctgaggccagacgaacatatcgctaagcagcgatacatcggcggcaagaacttgcctactaggggtaccgcagaatggctgtccttcgacgtgactgatacggttcgcgaatggttgctgagaagagagtcaaatctgggcctggaaattagtatccactgtccctgccacaccttccagcctaatggagatatccttgagaacattcacgaggtgatggaaattaaatttaagggtgtcgacaacgaagacgaccacggtaggggcgacctgggccgattaaagaaacaaaaagatcaccataaccctcatctgattctgatgatgattcccccccatcgtttggacaaccctggccagggcgggcaacgaaaaaagcgagcgcttgacaccaattactgctttcgaaacttagaggagaattgctgcgtgcggccattatacattgacttccgacaggacttaggctggaagtgggtccatgaacccaagggctactatgccaatttttgcagtggcccatgcccctacttgaggagcgcggatactacacattccacggtgttagggctctataacacattaaacccggaggcgagtgccagtccttgttgcgtgccgcaagatctggagcctcttacaatactttattacgttgggcgaacacctaaagtcgaacagctgtccaacatggtggtgaagtcttgtaaatgttca

SEQ ID NO: 20156 - DNA, 1236 bp, synthetic construct
  misc_feature 1..1236: note = source = /note="Description of Artificial Sequence: Synthetic coding sequence"
  source 1..1236: mol_type = other DNA
atgaaaatgcatcttcagagagcgctcgtcgttttggcactgcttaacttcgccaccgtgtccctgtccctgagcacttgtacgaccctggacttcggacatatcaagaagaagcgggtggaagccatcagggggcaaatcttgagcaagctccggctgacttcgcccccggaaccaaccgttatgactcacgtgccttaccaggtgctcgcgctgtacaattccactagagagctgttggaagagatgcatggagagcgggaggaagggtgcactcaggaaaacaccgaaagtgaatactacgctaaagaaatccataagttcgatatgattcaaggcctggctgaacacaacgagctcgctgtgtgccccaaaggcattactagcaaggtgtttcgctttaacgtgagctcagtcgaaaagaacagaactaatctgttccgtgcggaattcagggtgctgagagtgcccaacccgagctccaagaggaacgaacaacggatcgaactgttccagatcctgcggcccgacgaacacatcgcaaagcaacgctacatcggcggcaaaaacctgccgactagagggaccgctgaatggctctcgttcgacgtcaccgataccgtacgggaatggttgttgcggcgcgagtcaaatctggggttggaaatttcgattcactgcccctgccatactttccaaccaaatggagacatcctcgagaatatccacgaggtgatggagataaagttcaagggcgtcgataatgaagatgatcacgggcgcggtgatctcgggcggctgaaaaagcagaaggaccaccataacccacacctcatcctcatgatgatccctcctcaccgactggacaacccgggacagggtgggcagcgaaagaagagggctctggatactaactactgcttcagaaacctcgaggaaaattgctgcgtgcgaccgttgtatatcgactttaggcaggacctgggctggaagtgggtgcatgagccgaaaggatactacgcaaacttttgctcaggaccttgtccgtacctgcgctccgccgacacgacccatagcactgtcctcggtctgtacaatacgttgaaccccgaggcatctgcttcaccttgttgcgtgccacaggacctggagcccctgaccatcctctactacgttggtcgcaccccaaaggtcgaacagctttcaaacatggtcgtcaagtcgtgcaaatgctcg

SEQ ID NO: 20157 - DNA, 1236 bp, synthetic construct
  misc_feature 1..1236: note = source = /note="Description of Artificial Sequence: Synthetic coding sequence"
  source 1..1236: mol_type = other DNA
atgaagatgcacctgcagcgcgctcttgtggtgctggccctcctgaatttcgccaccgtctctctgtcccttagcacttgtactactctggacttcggacatatcaaaaagaagcgagttgaggccattagggggcagattctttccaaactgcgtctgacctcgccgccagaaccaaccgtcatgacccacgtcccataccaggtgctggcactttacaatagtactagagaactcctggaggagatgcacggagagagagaagagggctgcacgcaagagaacaccgaaagcgaatactacgctaaagaaattcacaaattcgacatgatacagggactggcagaacataacgaattggccgtgtgccccaagggaatcacctccaaggtattccggtttaacgtctcgtcagtggaaaagaatagaaccaatttgtttcgggcggagttccgcgtgctgcgtgtgccgaatccttcatcgaaacggaacgaacagcggatcgaactcttccagatcctcagaccggacgagcatatcgcgaagcagcggtacattggaggaaaaaacctccctactcgaggcaccgcggagtggcttagctttgacgtgactgacaccgtgcgggaatggctgctgaggcgggaatccaatctggggctggagatatccatccattgcccctgccacacgtttcagccgaacggagacatcctggaaaacatccatgaggtcatggaaatcaagtttaagggcgtagataatgaagatgatcacggtcgcggagatctcggtagactgaagaagcaaaaggatcaccacaacccgcacctcatcctgatgatgatcccgccacatcgcctcgacaatccgggtcaaggaggacagaggaagaagcgggccctggacaccaactactgtttcaggaacctcgaggagaactgctgcgtgcggcctctgtacatcgatttcaggcaagacctgggatggaagtgggtgcacgaaccgaagggctactatgccaacttttgctcgggtccgtgcccgtacctccggtcggcagacacgacgcattctacggtgctcggactgtacaacacgctgaacccggaagctagcgcctcaccttgttgtgtgccacaggaccttgagcctctgactatcctctattacgttggccgcacccccaaggtggaacagctttccaatatggtggtgaaatcatgtaaatgcagc

SEQ ID NO: 20158 - DNA, 1236 bp, synthetic construct
  misc_feature 1..1236: note = source = /note="Description of Artificial Sequence: Synthetic coding sequence"
  source 1..1236: mol_type = other DNA
atgaagatgcatctccaacgggctcttgtggtcctcgccctcctgaacttcgctacggtgtctttgtcgctttccacgtgcaccaccctggattttggacacattaagaagaagcgtgtggaggcgatccgcggtcaaatcctctcgaagctcagactgacgtcccctccggaaccgaccgtgatgacccatgtgccctaccaggtgctcgccctctacaatagcactagagaactgctggaagaaatgcatggagaacgggaagaaggctgcactcaggaaaacacggaatcggaatactacgcgaaagaaatccataagtttgatatgatccagggactcgcagagcacaacgagctggcagtgtgtccgaagggaatcacctccaaggtgttcagatttaacgtttcctcggtcgagaagaacaggactaatctgttccgagccgagttcagggtgctgcgagtgccaaacccttcgagtaaacgcaatgaacaaaggatagagcttttccagatcctgcggccggacgaacacatagccaaacaaagatacattggaggcaagaatcttccgacccgagggaccgcggagtggctgtccttcgacgtcaccgacactgttcgggagtggctgctccggcgggagtcgaatctggggctggagatttcgatccactgcccgtgccatactttccagccgaacggcgacatcctggaaaacatccacgaggttatggagatcaagttcaagggtgtcgataacgaggacgatcacgggagaggcgatctggggagattgaaaaaacaaaaggaccaccataaccctcaccttatcctgatgatgatcccgccccacaggttggataaccctggacagggaggacagagaaaaaagcgggctctggacaccaattactgcttcagaaatttggaggaaaattgctgtgtccgcccactctacattgacttccgccaggacctgggatggaaatgggtgcatgaacctaaaggttactacgccaatttctgtagcgggccctgcccgtatctccgctcggcggacaccacccactccaccgtcctgggactctacaacactttgaatccggaagcctcagcatccccgtgctgtgtgccccaagatcttgaaccactgaccatcctgtattacgtaggacgcaccccaaaggtggagcaacttagcaacatggtagtgaaaagctgcaagtgctcc

SEQ ID NO: 20159 - DNA, 1236 bp, synthetic construct
  misc_feature 1..1236: note = source = /note="Description of Artificial Sequence: Synthetic coding sequence"
  source 1..1236: mol_type = other DNA
atgaagatgcaccttcagagagcactggtggtcctcgccctgctcaactttgcaactgtgtcattgtcgctgtcaacttgcactacccttgatttcggtcacatcaagaaaaaacgtgttgaagctatcaggggccagatcctctcgaagctcaggctcacttcgcctccagaaccaaccgtgatgacccacgttccttaccaagtccttgccctttacaactctactcgcgagctgctcgaagaaatgcatggggaaagagaagaaggttgcacgcaggaaaacaccgaatcagagtactacgccaaggagatccacaagtttgacatgatccaagggcttgcggaacataacgaactggcagtgtgcccaaaaggtattactagtaaagtttttcggtttaatgtctcgtcggtggaaaagaatcggaccaacctctttcgggccgagtttagagtcctcagagtgcccaacccatcatccaagcgaaacgaacagaggattgagctgtttcagattcttcgacctgatgaacatattgctaagcagcgatacatcggtggaaagaatctgcctactcggggcactgcagagtggcttagctttgacgtgactgatactgtgcgcgaatggctgcttagaagagagagcaacctgggcttggaaatttcaattcactgtccttgtcacactttccaaccgaacggcgatattctggaaaacattcatgaggtgatggagattaagtttaagggagtggataatgaagatgaccatggtcggggtgatctgggccgccttaagaagcaaaaagatcatcataaccctcaccttattcttatgatgataccaccccatcgactggataacccaggacaaggaggccagaggaaaaagagagcccttgataccaattactgctttcgtaacctggaggaaaactgttgtgtgcgccccctgtatattgactttagacaagatcttggttggaaatgggtgcacgagccaaagggatactacgcaaatttctgttcgggtccatgtccctacctgcgctccgctgacactactcattccaccgtgctcgggctttacaacaccctcaatcccgaggcatctgcatccccatgttgtgtgccgcaagatcttgagccactgaccatcctgtactacgtcggaagaaccccaaaggtcgagcaactctcgaatatggtggtgaagtcatgcaagtgttcg

SEQ ID NO: 20160 - DNA, 1236 bp, synthetic construct
  misc_feature 1..1236: note = source = /note="Description of Artificial Sequence: Synthetic coding sequence"
  source 1..1236: mol_type = other DNA
atgaagatgcacctgcaacgggctctcgtggtgctggcactgctcaacttcgctactgtctcgctgtccctttccacttgtaccactttggattttgggcatatcaagaagaaaagagtggaagccatccgaggacagatcctgtccaagctcaggctcaccagccccccggagcctactgtcatgactcacgtgccgtaccaagtgctcgcgctgtacaacagcacgcgggaacttttggaggaaatgcacggagaaagagaggaaggatgcactcaggaaaataccgagtcagaatactatgctaaggagatccataaattcgacatgatccaagggctggccgaacacaacgaactcgcggtctgtcctaagggtatcacctcgaaggtgttccgcttcaatgtgtctagcgtggagaaaaaccgcaccaatcttttccgcgccgagtttcgtgtgctgagagtgccgaacccgagctccaaacgcaatgagcaacggattgaactgttccagatcctccgcccggatgagcacatagcaaagcagcgctacatcggaggaaagaacctgccaacccggggaaccgccgagtggctctcgttcgacgttactgacaccgtgagggagtggctgctgcggcgcgaaagtaatttgggcttggaaatctcaattcactgcccatgccatacgtttcagcccaacggagacatcctggaaaatattcatgaagtgatggaaatcaaatttaagggcgtcgacaacgaggatgatcatggccgcggggatcttggacggctgaaaaagcagaaggaccatcacaacccacacctgatcctgatgatgatccctcctcacaggcttgataacccgggacagggcggccagagaaagaagcgggccctcgacaccaattactgcttccgcaatctcgaggagaactgctgcgtgcgcccactctacatcgacttcagacaagacctgggatggaagtgggtgcacgagccgaagggttactacgcaaacttctgctccggaccgtgcccatacctgagatcagccgataccactcatagcactgtgctgggcctgtataatactctgaaccctgaagcgtcggcgtcaccctgctgtgtcccgcaggacctggaaccgctcacgattttgtactacgtcggtcggaccccaaaggtcgaacaactgtccaacatggttgtgaaatcgtgtaaatgctcg

SEQ ID NO: 20161 - DNA, 1236 bp, synthetic construct
  misc_feature 1..1236: note = source = /note="Description of Artificial Sequence: Synthetic coding sequence"
  source 1..1236: mol_type = other DNA
atgaaaatgcacttgcagcgggcgttggtggttttagccctgcttaactttgcaacagtgtccctgagcctgtcaacgtgcacgacactggatttcggtcacattaaaaagaagcgagtcgaggccatccgtggccaaatcttgtcaaagctacgcctgacctccccaccagagcccaccgttatgacgcacgttccctaccaggtgctggctttgtacaatagcacccgcgagctgctggaggaaatgcacggcgagcgtgaggaagggtgcacccaggagaacacggagtcggagtactatgccaaggaaatacacaagttcgacatgatccaaggcctcgcggaacataacgaactggctgtttgtccaaagggaattaccagcaaggtgttccgattcaatgtctccagcgtggagaagaaccgtacaaaccttttccgcgcggaatttagggttttgcgagtgccgaacccatcttctaagcgcaacgagcaacgtatcgaattgttccagattttacgacccgacgagcacattgccaagcagaggtatatcggcggcaagaatctccccacccgcggcacggcagaatggctttcatttgatgttacggacaccgtccgggagtggttgctgaggagggagtccaacctgggcctcgagatctccatccactgcccgtgccatacgtttcagcccaatggagatatcttggagaatatccacgaggtcatggagatcaaattcaaaggcgtggataatgaggacgaccacggcaggggagatcttggccgtttgaagaaacagaaggaccatcacaatccgcacctaattctgatgatgatacctccccacagactggataacccaggtcaaggcggccagaggaagaagcgagccttggacacgaactactgcttccggaacttggaagaaaactgttgcgtccggcccctgtacattgacttccgccaggatctgggctggaagtgggttcacgagcccaaaggatattatgctaacttttgcagtggcccatgcccatacctgcgttcggcggacaccacgcactcgacagtgctgggtctctataatactctgaaccccgaggcgagcgcaagtccgtgctgcgtgccgcaggacctggagccgctgacaatcctgtattacgtgggccggacccccaaagtggagcaactatccaacatggtggttaaaagctgcaagtgcagc

SEQ ID NO: 20162 - DNA, 1236 bp, synthetic construct
  misc_feature 1..1236: note = source = /note="Description of Artificial Sequence: Synthetic coding sequence"
  source 1..1236: mol_type = other DNA
atgaaaatgcaccttcagcgggctctcgtagtccttgctttgctgaactttgctacagtgtctctatccctctctacttgtacaacgttggatttcgggcacatcaagaaaaaacgggtggaagccatccgggggcagatattatccaagctccgccttactagtcctcctgaaccaactgtcatgactcacgtgccctatcaggttttggctttatataattccacacgggaattattggaagagatgcacggagaacgagaagagggatgtactcaggagaacacagaaagtgaatattacgcaaaagaaatccacaaatttgatatgatccaggggctggcagaacataacgagctcgccgtgtgtccaaaagggataacttccaaagtttttcgctttaatgtatccagtgtggaaaaaaaccgaacaaacctatttagggccgaatttcgagtcctacgcgtgcctaatccttcatctaaaagaaatgaacagcgaatcgaactctttcagattctacgacccgatgaacacatcgctaaacagaggtatatcggggggaaaaatctccccacacgcggaacagctgaatggctctccttcgatgttacagatactgtgcgcgagtggctactccgccgggaatccaatctcgggctagaaatctcaatacattgtccatgtcatactttccagcccaatggggacatcctagaaaatatacatgaggttatggaaatcaaatttaagggagttgataatgaagatgaccatgggcggggagatttagggcgcctaaaaaaacagaaggatcaccataatccccatctgatcttaatgatgatacctccccatcggctggataatccaggacagggagggcagcggaagaaacgggcactggacactaactactgcttccgaaatctggaagaaaattgttgtgtccggcccctttatatcgatttcagacaggatttgggatggaaatgggtccacgaaccaaaaggatattatgccaacttctgttcaggaccgtgcccctatctgcgatccgctgatactactcattcaactgtgctggggctctacaatactctgaatcctgaagcatcagcctctccatgctgtgtgcctcaggatctcgaaccactgactatcctgtattatgttgggcggacacccaaagttgagcagctctcaaacatggtcgttaaatcttgcaaatgtagt

SEQ ID NO: 20163 - DNA, 1236 bp, synthetic construct
  misc_feature 1..1236: note = source = /note="Description of Artificial Sequence: Synthetic coding sequence"
  source 1..1236: mol_type = other DNA
atgaaaatgcacctgcagagagcgctcgtcgtgttggcactcctgaacttcgccactgtgagcttgtcgctctccacgtgtacgactctggacttcgggcacatcaagaaaaagcgcgtggaagcgatccgcggacagatcttgtctaaactgcggctgacttcgccacctgagccgaccgtcatgacccacgtcccataccaagtcctggccctgtacaacagcactcgggagctgctggaagagatgcatggggagcgcgaagaagggtgcacccaagagaacaccgagtcagagtattacgcaaaggaaatccacaagttcgacatgatccagggactggcagaacacaatgagctggccgtctgtccgaaaggaatcacttctaaggtgttccgattcaatgtgagctcggtggagaagaacaggaccaacctgtttcgcgccgagtttagagtcctgagagtgccaaatccgtcgtcgaagcgaaacgaacaacgcatcgaactctttcaaatcctgcgcccggatgaacacattgccaagcaacggtacattgggggaaagaacttgccgaccagaggaaccgcggaatggctgtcgttcgacgttaccgacaccgtgagagaatggctgctccgcagggagtccaatttgggacttgaaatcagcatacactgtccgtgccatacttttcagccgaatggcgacatcctcgagaacatccacgaagtgatggaaatcaagttcaagggagtggacaatgaggacgatcatggaaggggtgacctgggacgactgaagaaacagaaggatcatcacaatccgcatttgatccttatgatgatccctccacatcgcctcgataaccccggacagggcgggcagcgaaagaagcgcgcccttgacacgaactattgtttccggaatctggaagagaattgctgtgtgaggccgctctacatcgacttccgccaagatctggggtggaagtgggtccacgaaccaaagggatactacgctaacttctgtagcggcccttgcccgtatctgcgttctgcggatacgactcattcaaccgtgctgggcctgtacaacactctgaacccagaagcctcagcatccccttgttgcgttcctcaagacctcgagccgctcaccattctgtactacgtgggacgcacgcccaaggtcgagcagctgtcgaacatggtcgtgaaatcatgtaaatgctcc

SEQ ID NO: 20164 - DNA, 1236 bp, synthetic construct
  misc_feature 1..1236: note = source = /note="Description of Artificial Sequence: Synthetic coding sequence"
  source 1..1236: mol_type = other DNA
atgaaaatgcacctccaacgagcgcttgtggtgctggcacttctgaactttgcaacggttagcctctcactctcgacgtgtacgaccctcgattttggtcatatcaagaaaaagcgggtggaagcaatccggggacaaatactttccaagctcagacttacgagccctcccgagccaaccgtgatgacccatgtgccttaccaagtgctggcgttgtacaatagcactcgggagctccttgaagagatgcatggtgagagagaggaaggctgcactcaggagaacaccgaatcagaatactacgctaaggagatccataagttcgacatgatccagggactcgcagaacacaatgagcttgcagtctgccctaaggggattacgtcaaaggttttccgtttcaatgtgtcctcggtggaaaagaacagaaccaaccttttccgagccgaatttagagttttgcgtgtgccaaatccatcgtccaagcggaacgaacaaagaattgaactgtttcaaatactgcggccggacgaacatattgcaaagcagaggtatatcgggggtaagaatctccccacgcgcggaacggcagaatggctgagcttcgatgtgactgataccgtcagggagtggctgctgcggcgggaatccaatctgggacttgagatctccattcactgtccctgtcataccttccagcctaacggagacatactcgagaacatccacgaggtgatggagataaagtttaagggcgtggataacgaagatgatcacggaaggggtgatcttggaagattgaagaagcaaaaggaccatcacaatccacatctgattctcatgatgattccgcctcatcgactggataaccctggtcagggtggtcagcggaagaagcgggccctggatactaactactgttttaggaacctcgaagaaaattgttgtgtcagaccactgtacatcgattttaggcaggatcttggatggaagtgggtgcatgaaccaaagggttactacgcgaacttttgttcgggtccatgcccataccttagatcagctgatactacccattccacggtgcttggactgtacaacactctgaaccctgaagcgagcgcctcaccgtgctgtgtgccccaagacctggagcccctcaccatcctttactacgtcggtagaacccctaaagtcgaacaactctccaatatggttgtcaaatcgtgtaaatgctca

SEQ ID NO: 20165 - DNA, 1236 bp, synthetic construct
  misc_feature 1..1236: note = source = /note="Description of Artificial Sequence: Synthetic coding sequence"
  source 1..1236: mol_type = other DNA
atgaaaatgcacctgcagagagccttggtggtcttggctctgttgaacttcgcaacagtttccctgtccctgtccacatgcaccaccctcgatttcggtcacattaaaaaaaaaagagtggaagctataagaggacagatactgtctaagctgaggcttacaagcccccctgaaccaaccgtcatgactcacgtaccttaccaggtgcttgcattgtataactccacacgggagcttttggaggaaatgcacggagagagggaggaggggtgcacacaagaaaatacggaatcagagtactacgctaaggagattcataagttcgacatgattcaaggacttgccgaacacaatgaactggccgtttgcccgaagggtatcacatccaaggtgttccgcttcaacgtcagcagcgtggagaaaaatagaaccaatctgttccgagctgaattccgcgtcttgcgagtgccaaacccttcctctaagcgcaacgagcaacgaattgagttgtttcagatattgaggcctgatgaacacatcgctaagcagcgctacataggaggcaaaaatctcccaactagagggactgcggaatggctgagcttcgatgtgactgataccgtccgcgaatggcttcttcggagggagtcaaacttggggctggagatcagtatccactgtccttgccacacatttcagccaaacggcgacatactggagaatatccatgaggttatggaaataaagttcaagggcgtcgacaacgaggacgatcatggtcgaggagacctgggacgactgaagaaacagaaggaccaccataaccctcacctcatccttatgatgatcccgccccaccgcctggataaccctggacagggcggtcaacggaagaagcgggctttggacactaattactgctttaggaacttggaggagaactgttgcgtcaggcctctgtatattgactttcgccaggacctgggctggaaatgggtgcatgagccaaaagggtactacgcaaacttctgcagcggaccctgtccgtatctgcgcagcgccgacaccacccatagcactgtgctggggctctacaataccctgaatcccgaagccagcgcctcaccctgttgtgtgcctcaggatctggagcctctcacaatcttgtactacgtgggtcgcacacctaaagtggaacagctgagcaatatggttgtcaagtcttgcaagtgctct

SEQ ID NO: 20166 - DNA, 1236 bp, synthetic construct
  misc_feature 1..1236: note = source = /note="Description of Artificial Sequence: Synthetic coding sequence"
  source 1..1236: mol_type = other DNA
atgaagatgcacttgcagagggctttggtggtgctggctttattgaattttgcaaccgtcagcctaagcctgagcacatgcacaacactggattttgggcatatcaagaagaagcgggtggaagccattagagggcagattctgagtaaattgagactcaccagcccccccgagcccactgttatgacacacgtgccttaccaggtactggccctctataactctaccagagaactgttggaggagatgcacggggagcgagaagagggatgcactcaagagaacacagagtcagagtactatgccaaagaaattcacaagttcgatatgatccagggtttagccgagcacaatgagttggcggtgtgtcccaagggcattacaagcaaggtttttagattcaatgtgtcttccgtcgagaaaaacagaacgaatttatttagagctgaattccgcgtgcttcgggttccaaatccgagcagtaagcggaacgagcagcgtatcgagctgttccagatccttaggccggatgagcacattgcaaagcagagatacattggaggcaagaacctccccactcgagggaccgccgagtggttatcgttcgatgttactgacaccgtgcgtgagtggcttctgcgccgggaatcaaatttgggactggaaatcagtattcattgtccatgccacactttccagcctaatggagacatcctggaaaatatccatgaagtgatggagatcaaattcaagggagtagacaatgaagatgaccacggacgaggagatctggggaggttgaaaaaacagaaggaccatcacaatccgcatttgattctcatgatgatcccaccccaccgtctcgacaacccgggccagggcgggcagagaaaaaaaagggcccttgacacgaactactgttttagaaacctagaagaaaattgttgcgtacgtccactctacattgactttcgccaggatctcggatggaaatgggtgcatgaaccgaaaggctattacgccaatttctgttctggcccatgcccgtatctgcgctcagcagacaccacccactcaaccgtgctggggctgtataatacgctcaaccctgaagcgagtgcgtctccctgctgtgtccctcaagatcttgaacccctgaccatactgtactacgttggacgaacaccaaaggtagaacagctatctaatatggtggtgaagagctgtaaatgtagc

SEQ ID NO: 20167 - DNA, 1236 bp, synthetic construct
  misc_feature 1..1236: note = source = /note="Description of Artificial Sequence: Synthetic coding sequence"
  source 1..1236: mol_type = other DNA
atgaagatgcatttgcagagagcactggtcgtgctggcattgttgaattttgcaaccgtgtccctctcattgtccacttgtactaccttggactttggacacataaagaaaaagcgagtggaagcaattagaggacaaattctttcaaagctgaggcttacgtcgcctccggagccaaccgttatgactcatgtgccttaccaggtgctggcactgtacaactccactagggaactcctcgaggaaatgcatggggaaagagaagagggttgtacccaggaaaataccgaatccgaatactacgccaaggaaattcataagtttgacatgattcaggggctggcggaacacaacgaactcgcagtgtgtcctaagggaataacctcgaaggtgtttagatttaacgtttcgagcgtcgagaagaacaggacgaatctgttccgggcagaattcagagtgcttcgagtccctaacccatcgtccaagcgcaatgagcagcgcatagaattgttccaaatacttcgcccggatgaacatattgccaaacaaaggtacatcggaggtaaaaacctccccacccggggcacggccgagtggcttagctttgatgtgacggacacggtcagagagtggcttctgcgacgcgagtcaaacctggggcttgaaattagcatccactgcccatgccatacctttcagcctaatggtgacattctcgaaaacattcatgaagtgatggagattaagttcaaaggggtggacaatgaagatgaccatggacgcggtgacctcggccggctcaagaaacaaaaggatcatcataacccccaccttatcctcatgatgatacctcctcatcggctcgacaatccaggacagggaggtcaacggaagaagagagcgctggataccaactactgctttcgcaaccttgaagaaaactgttgtgtcagacccctgtacatcgacttcagacaggatctggggtggaagtgggtccacgaacctaagggctactacgcaaacttctgttcagggccttgcccctacctcagatctgcggacactacccattccaccgtgctggggctttacaatactcttaaccctgaagcatccgcatcgccatgttgtgtccctcaagaccttgaaccacttacgattctctactacgtgggccgaacccctaaggtggaacagctgtcgaacatggtggtgaaatcgtgcaagtgcagc

SEQ ID NO: 20168 - DNA, 1236 bp, synthetic construct
  misc_feature 1..1236: note = source = /note="Description of Artificial Sequence: Synthetic coding sequence"
  source 1..1236: mol_type = other DNA
atgaaaatgcatctacagagagctctcgttgttctagctttgctcaatttcgccacagtgtccctgtccctttctacttgcactactctagatttcggacatataaaaaaaaaacgagttgaagcaatcagagggcagatactgtctaaattgcgactgacgtctccccccgagcctactgttatgacacatgttccctaccaggtactcgcattatataactcgacacgcgagctcctcgaggaaatgcacggggaaagagaagaaggatgcacacaggaaaacacagaatcagaatactacgctaaagaaatccataaatttgatatgatacagggacttgccgaacataatgaactggccgtctgtcctaaagggattacatcgaaagtattccggttcaatgtatcttcggtagaaaaaaaccgaacaaatctttttcgggcagaattcagggtgctcagagtgcctaaccctagttctaaacgcaacgaacagcgcatcgaactgttccagatactgagacccgatgaacatatagcaaaacagcgttacataggggggaaaaacctcccaactcgagggacagccgaatggttatcctttgatgtgacagatacagtgagggaatggcttctcaggcgggaatcaaatctcgggcttgaaataagtatacactgtccctgtcatactttccagcctaacggagatatactagaaaacattcacgaagtgatggaaatcaaatttaaaggagtggataatgaagacgatcacgggcggggggatctagggcggctcaaaaaacaaaaggatcaccacaatccccatttgatacttatgatgatccctccccataggttggataaccctgggcagggggggcagagaaaaaaaagagccctcgatacaaattattgctttagaaacctggaagaaaattgctgtgtcagacctctatatatcgatttccggcaggatctcggatggaagtgggtccacgaacccaaagggtattatgcaaatttttgttctggaccatgtccataccttaggtctgccgatacaactcactcaactgtgttagggctctacaacactctcaacccagaagcatctgcgtctccttgttgtgtcccccaggatctggagcccctcactatcctgtattatgtggggaggactcccaaagtggaacagctatctaacatggtggtgaagagttgtaaatgcagt

SEQ ID NO: 20169 - DNA, 1236 bp, synthetic construct
  misc_feature 1..1236: note = source = /note="Description of Artificial Sequence: Synthetic coding sequence"
  source 1..1236: mol_type = other DNA
atgaaaatgcatctgcaacgggcacttgtcgttcttgccttactgaattttgcaaccgtctccctctctctcagcacctgtactaccctggattttggccatattaagaaaaagcgggtcgaagctataaggggacaaattctgagtaagttaagactcacttctccgcctgaacctacagtgatgacccatgtaccctaccaggttctggcgctgtacaactcaactcgcgagctgttggaggaaatgcacggagagagagaagaggggtgcacccaggaaaacactgaatctgagtactatgcgaaggaaatacacaagtttgacatgattcagggcttggccgaacataatgagctggcggtgtgtcccaaggggatcacttccaaagtgtttaggtttaatgtatcttcagttgaaaaaaatagaacaaacctgttccgcgctgagttcagagtgctgagggtgccaaacccaagctcaaaacggaacgagcagcgaatcgagctttttcagatcttgcgccccgacgaacacattgcgaaacaacggtacattggcggaaaaaatctgcccacacggggcacagccgaatggctatccttcgacgttactgacaccgtacgcgagtggttgcttaggcgtgagagcaacctgggtcttgaaatcagcattcactgcccatgtcataccttccagccaaacggcgacatattggaaaacattcatgaggtgatggaaatcaaatttaagggcgtggataacgaggacgaccacggcagaggagatctcgggcgacttaagaagcagaaggaccaccacaatccacatctgatcctaatgatgattccacctcatcgactggacaaccccggccagggtggacaacgcaagaaacgggcactcgatactaactattgcttcagaaatctggaggaaaactgttgtgtacgacctctgtatattgattttcgacaggacctcgggtggaagtgggttcacgagcccaaggggtattatgcgaatttctgcagtgggccctgcccctacctccgcagcgctgacaccacccatagtacggttctggggttatacaacactttgaatcctgaggcttccgcgagcccttgctgtgtgccccaggacttggagcccctaactattctttattatgttggcaggacccccaaggttgaacagttatccaacatggtggtaaaatcctgcaaatgttcg

SEQ ID NO: 20170 - DNA, 1236 bp, synthetic construct
  misc_feature 1..1236: note = source = /note="Description of Artificial Sequence: Synthetic coding sequence"
  source 1..1236: mol_type = other DNA
atgaagatgcacctccagcgtgccctggttgtgctggccttgttgaatttcgccaccgtctcgctgtccctctccacctgcaccaccctagacttcggacacatcaagaagaagagggtggaagccatcaggggccaaatcctctcaaagttacgcctgaccagtcccccagaacctacagttatgacccacgttccataccaggttttggccctgtataattccacccgagagctgcttgaagagatgcacggcgagcgggaggaaggctgcactcaggaaaataccgagtcggaatactacgcaaaggaaatccataagttcgacatgatccaggggctggccgaacataacgaactagccgtgtgccctaagggcatcacgtcaaaggtttttcgcttcaatgtgagctctgtggaaaagaaccggactaacttgttccgagctgaattccgggtcctgcgagtccctaatccaagcagtaagagaaacgaacaaagaatcgagttgttccagatcttgaggccggacgagcatatcgccaagcagaggtacattggaggaaagaaccttcctacaagaggtacggctgagtggctcagtttcgatgttaccgacacagtgagggaatggttactgcggagagaaagcaatctgggcctggagatttccatccactgcccttgccatacgttccagccgaatggggatattctcgagaatatccacgaagtgatggagattaagttcaaaggggtcgataacgaggacgaccatggtcgaggcgatctgggaagactgaaaaagcagaaggatcatcacaatcctcatctgatcctgatgatgattccaccacaccgcctggacaacccgggccagggcggacagcgaaagaagagagccctagatacaaattactgttttagaaacctggaggaaaactgctgtgtcagaccgctgtatatcgattttcgccaggacctgggatggaaatgggtgcatgagccaaaaggctactacgcaaatttctgctccgggccctgcccctacctgagatctgctgatactacccactcaactgtcctggggttatataacaccctgaatcccgaagcctccgcttctccttgctgcgtccctcaggacttggagcccctcacaatactgtattatgtgggacggactcctaaggtagaacagctgtccaacatggtggtcaaaagctgcaagtgctcc

SEQ ID NO: 20171 - DNA, 1236 bp, synthetic construct
  misc_feature 1..1236: note = source = /note="Description of Artificial Sequence: Synthetic coding sequence"
  source 1..1236: mol_type = other DNA
atgaaaatgcatctgcagagggcccttgtagttttagccctgctgaacttcgccacagttagcttgtctctcagcacctgcaccaccctggactttggccacattaaaaagaaacgggttgaagcaatcaggggccagattctgtctaagttgcgcctgaccagccctccggagccaactgtgatgacccacgtcccctatcaggtgctcgcactgtacaattctacaagggagctcctggaggagatgcatggcgagcgcgaggagggctgcacacaagaaaataccgaatcagagtactatgctaaggagatacacaagtttgacatgatccagggtctggctgaacacaacgaactcgcagtgtgtccaaaaggtatcacatcaaaagtgttccggttcaacgtgtctagcgtggagaagaatcgaacaaatctgtttcgcgcagagtttcgggtgctgcgcgtgccaaatccctcttctaaacgcaacgagcagcgaattgaactgtttcagattctcagaccagatgagcacattgccaaacaacgctacataggaggaaaaaacctgcccactaggggaacggccgaatggctgtcctttgacgtcacagataccgttcgggaatggttgctgcgccgcgaatcgaatctgggtttggagataagtattcattgcccatgccatacattccagcccaacggtgatattctcgagaatattcacgaagtgatggagatcaaatttaagggtgtggacaatgaggacgaccatggaaggggggacctcggcagactcaagaaacaaaaggaccaccacaatccgcacctaattcttatgatgataccaccacatagactagataaccctggacagggaggtcagcgaaagaaacgcgctttggatactaactattgcttcaggaacctagaagagaactgctgcgtgcgccccctctacatcgacttcagacaggatttggggtggaaatgggtccacgagcctaaaggatactacgccaacttctgttccgggccatgcccatatcttcgctccgcggataccactcactccaccgttctggggctgtataacacacttaaccccgaggctagcgccagtccttgttgcgtcccacaggatttagagcccctcactatcctgtactatgtgggccggaccccaaaagtagaacaactgagtaatatggtagtgaagagctgtaagtgcagc

SEQ ID NO: 20172 - DNA, 1236 bp, synthetic construct
  misc_feature 1..1236: note = source = /note="Description of Artificial Sequence: Synthetic coding sequence"
  source 1..1236: mol_type = other DNA
atgaaaatgcacctccagcgcgctcttgtagtcttggcactgctgaacttcgctacggtatcattgtccttgagcacctgcaccacactggactttggtcacattaaaaagaaacgagtcgaggctattaggggtcagatcctctccaagctgaggttgacttcaccccctgagcctactgttatgacccatgtgccttaccaggttctcgctctgtacaatagcacccgcgagctgctggaggagatgcacggggagcgcgaagagggttgcacccaggagaacaccgagtctgaatactacgcgaaggagattcacaaattcgacatgatccagggcctggctgaacataatgagctcgccgtgtgccctaaaggaatcacctctaaggtgttccggttcaacgtatccagcgtagagaaaaatcggacaaatctttttcgcgctgaattccgcgtgctgcgagtacccaatccctcctctaaaaggaacgaacagagaatagaactcttccagatactgaggcccgatgaacatatcgctaagcagcggtatattggaggtaaaaaccttccaacccgggggactgcagagtggctgagctttgacgtcacagacactgtccgggagtggctcttgcggagagaatccaatctcggactggagatcagcattcactgtccatgtcacacctttcagcctaatggcgacattcttgaaaatattcacgaagtgatggaaataaaattcaagggggtggataacgaggacgaccatggccggggggacctcggaaggctgaagaagcagaaggaccaccacaacccccaccttatcctgatgatgataccaccgcaccgactcgacaaccctggacagggggggcagcggaagaaaagagctcttgacacaaattattgctttcggaatctggaagaaaattgctgtgtgcggccgttgtacatcgattttagacaggacctgggttggaagtgggtgcacgagcctaagggctattatgccaacttttgttctggcccctgcccttatctgagatccgctgacaccacccactctaccgtgctggggctttacaacaccctgaaccccgaagcatctgcgtcaccctgttgcgtgcctcaggacctggaaccgcttacaatcctgtattatgtcggtcgaacccctaaggtggaacagctgtctaacatggttgtgaagtcttgtaaatgcagc

SEQ ID NO: 20173 - DNA, 1236 bp, synthetic construct
  misc_feature 1..1236: note = source = /note="Description of Artificial Sequence: Synthetic coding sequence"
  source 1..1236: mol_type = other DNA
atgaagatgcacctccagcgcgcactggttgtgttggctctgctcaatttcgccactgtctccctgagtttgtcaacgtgcaccactctcgattttggacacatcaaaaagaagagggtggaggccatcaggggacagatcctcagtaaactgcggctgaccagcccgccggaacctaccgtcatgacccacgtgccttaccaggtgcttgctttgtataactccactcgggagctgcttgaagaaatgcatggcgagcgcgaggagggatgtacccaagaaaataccgagtcagagtattacgcgaaggaaatccacaaatttgatatgatccaagggttggcagagcacaatgaacttgccgtgtgcccaaagggaatcacttcaaaagtgttcaggttcaacgtgtcatccgtggagaaaaaccggactaatcttttcagagcggagtttcgggtgcttcgggtgccaaacccgtccagcaagaggaacgaacaacgcattgagctgttccagattctgcggccggacgaacatatagcgaaacaaagatacatcggtggaaagaacctgccgactcgcggcaccgcagagtggcttagcttcgacgtcaccgacactgtcagagaatggctgctgcgcagagaatcaaatcttggtctggagattagcattcattgcccgtgccatacgttccagcccaatggagatatccttgaaaacatccacgaagttatggagatcaagttcaagggtgtggacaatgaggacgaccatggacgcggggacctggggcgcctgaagaagcagaaggatcaccataacccgcacctcatcctcatgatgatcccaccgcatcgccttgacaatcccgggcaaggaggacagcggaagaaacgcgctctggacactaattactgttttagaaatcttgaggaaaactgctgtgtgcggcccctgtacatcgacttccgccaagatctgggatggaagtgggtacacgaacccaagggctactacgccaacttctgctcgggaccatgcccttacctccgctcggctgacacgactcactctacggtgctgggactgtacaacactctcaaccctgaagcgtccgcctccccctgctgcgtgccacaggatctggaaccgcttactatcttgtactacgtcggccggacccctaaagtggagcagctgtccaacatggtcgtgaaatcgtgtaaatgttcc

SEQ ID NO: 20174 - DNA, 1236 bp, synthetic construct
  misc_feature 1..1236: note = source = /note="Description of Artificial Sequence: Synthetic coding sequence"
  source 1..1236: mol_type = other DNA
atgaagatgcatctacaaagagcattagtggtgttagctttgttaaactttgcaactgttagtctttctttgtctacatgcacaaccctcgatttcggtcatataaagaagaagagagttgaagcaataagggggcaaattctatctaagctccggttgacctccccgccagaaccaacggttatgactcacgtcccgtatcaggtacttgccctttataattcgacccgagaattgttggaagaaatgcatggtgagagagaggaggggtgcactcaagagaataccgaatctgagtattatgcgaaggaaattcataagtttgatatgatacaaggattggcagagcataatgaactggccgtttgtccaaaaggtattacatccaaagtattcaggttcaatgtaagtagtgtggagaagaacagaactaacctttttcgggctgagttcagagtgttgagggtgcccaacccgtcgtcaaagagaaacgagcagagaatcgagcttttccaaatcctgaggccggatgaacacattgctaagcaacgatatattggtggaaagaacttacctacgcgcggaaccgctgaatggttgtctttcgacgtgactgatactgtcagggaatggcttctccgacgggagagcaatctaggtctggaaattagtattcattgcccttgccatacctttcaacctaatggtgacatactcgagaacatccacgaggtcatggagataaaattcaaaggggtggacaatgaggatgatcacggtcgtggtgatcttggaagattgaagaaacagaaggatcatcataatcctcacctcatattaatgatgatccctccacaccgactagataaccctggtcaggggggacaacggaaaaagagggcgcttgataccaactactgcttcagaaatttggaagagaactgttgcgttcgtccactatacattgacttcagacaagacttgggttggaagtgggtgcacgagcccaagggttattacgcaaatttctgcagtggtccgtgcccatatcttcgatcggcggatactactcacagtactgtgttgggactgtataatacgttgaatcctgaggcttctgcttccccttgttgtgtgcctcaagatttggaacctttaacaatcctgtactatgttggtcgtacgccaaaggtggagcaattgtcaaatatggttgttaagtcttgcaagtgcagc

SEQ ID NO: 20175 - DNA, 1236 bp, synthetic construct
  misc_feature 1..1236: note = source = /note="Description of Artificial Sequence: Synthetic coding sequence"
  source 1..1236: mol_type = other DNA
atgaagatgcacctgcaaagagcgctggtggtccttgcgctactgaatttcgccaccgtttctctctctctcagcacgtgcactactctcgacttcggtcacataaaaaaaaaaagagtggaagcaatccgggggcagattctgtccaagcttaggctgaccagcccacctgagcctaccgtaatgacgcacgtgccttaccaggttcttgccctgtacaacagcacgcgagagttactggaggaaatgcatggtgaaagagaggaaggatgcacccaagaaaacactgagtcagaatattacgccaaggagatacacaaattcgacatgatacagggtcttgcggaacataacgaactcgctgtatgtccgaagggcattacgagcaaagtgttccgatttaatgtgagctctgtggaaaagaacagaaccaatctgttccgcgccgagtttcgcgtgttgcgcgtgcccaatccctctagcaaacgtaacgaacaacgaattgagctgttccagatacttaggcccgatgagcatatcgccaaacaacggtatatcggaggcaaaaatctgccgaccagagggaccgccgaatggctaagttttgacgtaacggataccgtgagggaatggttgttacggcgcgagtccaatctagggttagagatctccatccactgtccatgccacacatttcagcctaatggggacatccttgaaaacatccatgaggtgatggagattaagttcaaaggtgtggataatgaagatgaccacgggcggggggacttaggccgtctgaagaagcagaaggatcaccataatccgcacctcattctgatgatgatccctccccacagacttgataatccgggacagggcggtcagagaaaaaaacgagcgctggacacaaattattgtttccgcaacctggaggagaattgctgcgtgagaccgttgtatattgacttcaggcaggacctgggttggaagtgggtgcatgaaccaaagggttattacgcaaacttctgtagcgggccttgcccctacctgagatcggctgatacgactcattctactgtattgggactgtacaatactctgaatccagaagcctccgcttctccttgctgtgtgccccaggacctggaacctctaaccatcctctactacgtcggacgcacccccaaggtggagcagctgtctaacatggtcgtgaaaagctgtaaatgctcc

SEQ ID NO: 20176 - DNA, 1236 bp, synthetic construct
  misc_feature 1..1236: note = source = /note="Description of Artificial Sequence: Synthetic coding sequence"
  source 1..1236: mol_type = other DNA
atgaagatgcacttgcagcgcgcccttgtcgtgcttgctttgctcaactttgctaccgtcagtctgagcctctcaacctgtaccacacttgattttggacacataaagaaaaagagagttgaagccattagaggtcagattttatctaagctgcggttgacatctccccccgagccaaccgtcatgactcacgtgccatatcaggttctggcactgtacaatagcacaagagaactgttagaggagatgcacggagagcgcgaagagggttgtactcaggaaaatactgagtccgaatattatgccaaagagatccataaattcgatatgatccagggcttggccgaacacaatgaacttgcagtatgtcctaagggaataactagcaaagtctttagattcaacgtttccagcgttgaaaagaaccgaaccaatctgttcagagccgagtttagagtcttgcgtgtgcccaatccgtcctcaaaacggaatgaacaacggattgaactgtttcagatcctgagacccgacgagcacattgctaaacagaggtacatcggcgggaagaatctaccaaccagggggacagcagagtggttgagttttgacgttaccgatacagtcagggagtggctgctcaggcgggaaagcaacttgggtctggagatttctatccattgcccctgccatacttttcaacccaatggtgacatcctggagaatatacatgaagtcatggaaatcaaatttaagggggtcgataacgaagatgatcacggccgcggcgacctgggccggcttaagaaacagaaggaccatcataacccccatcttatactcatgatgattccaccacaccggctggataatccaggccaggggggacagcggaaaaagagagcgctcgacactaattactgctttaggaatctcgaagagaattgttgtgtacggccactgtatattgactttcgacaggacctcggttggaagtgggtccatgaaccaaaggggtattacgccaatttctgttcaggtccttgtccgtatctgagaagtgcggacactacccattcgactgtgcttggactgtacaataccttgaatcctgaagcaagtgcttctccatgttgtgtgccgcaggacctcgagcctttgaccattctctactatgttggacgcacgcccaaagtggagcagcttagtaacatggtcgtgaagtcctgcaagtgtagc

SEQ ID NO: 20177 - DNA, 1236 bp, synthetic construct; identical to SEQ ID NO: 20141
  misc_feature 1..1236: note = source = /note="Description of Artificial Sequence: Synthetic coding sequence"
  source 1..1236: mol_type = other DNA

SEQ ID NO: 20178 - DNA, 1236 bp, synthetic construct
  misc_feature 1..1236: note = source = /note="Description of Artificial Sequence: Synthetic coding sequence"
  source 1..1236: mol_type = other DNA
atgaagatgcacctgcagcgcgcacttgtcgtgctggccctgctcaatttcgcaaccgtctcgcttagcctgtctacttgtactactctggatttcggacacatcaagaagaagagagtggaggccatcaggggccagatcctctcgaagctgcggctgacctcaccccctgagccaaccgtcatgacccatgtcccgtaccaggtgctggcactttacaatagcactcgggagctcctggaagagatgcacggagaacgggaggagggctgcacccaggaaaacacggaatccgaatactacgccaaggaaatccacaagtttgatatgatccaaggattggccgagcacaatgaattggctgtgtgcccaaagggtatcacttcaaaggttttccgcttcaacgtgagcagcgtggaaaagaaccgcactaacctgttccgcgccgaatttagagtgctccgggtgccaaacccatcctcgaagcgtaacgaacagcggatcgaactgttccaaatcctgcgacctgacgaacacattgccaagcagcgctacatcgggggaaagaacctgccaacccgtggaactgcagaatggctgtccttcgacgtgactgacaccgtgagagagtggctgctgcggagagaatccaacctgggactggaaatctcaatccactgcccatgccatacctttcagccgaatggagacatcctcgagaacatccacgaagtgatggaaatcaagtttaagggagtggataatgaggacgatcatggtcggggagatctgggacggctcaagaagcagaaggaccaccacaacccacaccttattctgatgatgattccgcctcaccggcttgacaatccgggtcaaggaggccagcgcaaaaagagggccctggacacgaattactgctttaggaacctggaggaaaactgttgtgttagaccactctacattgacttccggcaggacctcggttggaagtgggtgcatgagccgaagggctactacgcgaacttttgctccggcccatgcccgtacctgcgctcggccgacactacccattccactgtgctgggactgtacaataccctgaacccagaagcaagcgcctcgccgtgctgcgtgcctcaagatctggaaccgttgaccatcttgtactatgtgggaaggactccaaaagtcgaacagctttcgaacatggtggtgaagtcctgcaagtgttcc

SEQ ID NO: 20179 - DNA, 1236 bp, synthetic construct
  misc_feature 1..1236: note = source = /note="Description of Artificial Sequence: Synthetic coding sequence"
  source 1..1236: mol_type = other DNA
atgaaaatgcacctccagagggccctcgtggtgttggccttgctcaactttgccactgtctccctctccctgtctacttgtacaactctcgactttggccacattaaaaagaagagggtggaggccattagaggtcagattttatccaagctgcgactcacctctcctccagaacccacagtaatgacccacgtgccgtatcaagtgctcgcactgtacaattccacaagagaactcctcgaagaaatgcacggcgaaagggaggaggggtgcacacaggaaaacacagaatcggagtattatgcaaaggaaatccacaagttcgatatgatacagggactggccgagcacaacgagctcgccgtgtgccccaagggcattacatcgaaggttttcaggttcaatgtgtcaagcgtcgaaaagaatcggacaaatctgtttagggctgagttcagggtgcttcgtgtccctaatccttcatccaaacgcaacgagcagaggatcgagctatttcagatattgcgtcccgacgagcatatcgctaagcagagatacatcggagggaagaatctgcccactcggggcaccgcagaatggctgagcttcgacgtgacagatacagtgcgcgagtggctgctgcgtagggagtccaacctcggtttggagatatcgatccattgcccatgtcatacatttcaacctaacggcgatatcttggaaaacatccacgaagtcatggagattaagttcaagggcgtagataacgaggatgaccatggaagaggggacctgggccgcctgaaaaagcaaaaggaccaccataaccctcacctgatcctcatgatgatcccaccccaccgcctagacaaccctgggcaggggggacagagaaagaaacgtgcactggatacaaattactgctttcggaacctcgaggagaactgttgcgtacgaccattgtatatagacttccggcaagacctaggttggaaatgggtccacgagcccaagggatactacgctaacttctgctccggtccatgcccgtacctcaggtcagcggacacgactcattcaactgtgttgggtctctacaacacattgaaccccgaggctagcgcaagtccatgttgcgtgcctcaagatctggaaccacttacgatactttactatgtgggacggacccccaaggtagagcagctgtcaaacatggtggtaaagtcttgcaagtgctcc

SEQ ID NO: 20180 - DNA, 1236 bp, synthetic construct
  misc_feature 1..1236: note = source = /note="Description of Artificial Sequence: Synthetic coding sequence"
  source 1..1236: mol_type = other DNA
atgaagatgcacttgcagagggctctggtcgttctggcgctgctgaatttcgcgactgtttcactgtccctcagcacttgtaccactctcgactttggacacattaagaaaaaacgcgttgaggccattcgcggacagatcctgagcaagctgcggctcactagccctccagaaccgactgtgatgactcacgtgccctaccaggtcctggcactgtacaactcgactcgcgaactgcttgaggagatgcacggggagcgggaggaaggatgcacccaagaaaatacggagtccgaatactacgcaaaggaaatccacaaatttgacatgatccagggactggccgaacataatgagctggcggtgtgccccaagggcatcacgtccaaagtgttccggttcaacgtgtccagcgtggaaaagaatcgcaccaatctgttccgcgctgagtttcgcgttctccgcgtcccgaacccgagttccaagagaaacgaacagcggatcgaactttttcagatcctgcgcccggacgaacacatcgcgaagcaacggtacattggcggcaagaatctcccgacgaggggcaccgcggaatggttgtcgtttgacgtcaccgacaccgtgcgcgagtggctgctccgacgggaatccaacctgggtcttgagatctctatccactgcccatgccataccttccagccgaatggagacatcttggagaatatccacgaagtcatggaaatcaagtttaagggcgtggacaacgaggatgaccacggtcggggtgacctgggccgtctgaaaaagcagaaggaccatcataacccccacctcatcctgatgatgatcccgcctcaccgcctcgataatcctgggcaaggtggccagagaaagaagagggcactggataccaactactgcttccggaaccttgaggagaattgttgcgtgcggccactgtacatcgattttagacaggacctggggtggaaatgggtgcacgagcccaagggatactacgccaacttctgttccgggccctgcccgtacttgagatctgcagataccacccactccacggtcctcggactctacaataccctcaacccagaggctagcgcatccccgtgctgcgtaccgcaggacctggaaccacttactatcctttactacgtggggcgcactcctaaggtcgagcaactctcgaacatggtcgtgaagtcgtgcaagtgctcg

SEQ ID NO: 20181 - DNA, 1236 bp, synthetic construct
  misc_feature 1..1236: note = source = /note="Description of Artificial Sequence: Synthetic coding sequence"
  source 1..1236: mol_type = other DNA
atgaagatgcaccttcaacgggccctggttgtgctggccttgctcaatttcgccactgtctcactgagcctgtcgacttgcaccactctcgattttggtcacattaagaagaaaagagtcgaagcaatcagaggacagatcctgtcaaagctccggctcacctccccgccggaaccaactgtcatgacccacgtgccataccaggtcctcgccctttacaacagcacccgcgaactgctggaggagatgcatggagaacgggaggagggctgcacccaggaaaacaccgaatcggagtactacgccaaggaaattcataagttcgacatgatccaaggactggccgaacataatgaactggcggtgtgcccgaaaggcatcacctccaaggtgtttcgcttcaatgtctcctccgtcgagaagaaccgcactaacctgtttcgggctgaattccgcgtgctgcgagttcccaacccgtcgtccaagcgaaatgaacaaagaatcgaactgttccagatcctgcgaccggatgagcacatcgcgaagcaacgatacatcggaggcaagaaccttcctaccaggggaaccgctgagtggctgtcctttgacgtcactgacaccgtgagagaatggttgctgcgcagagaatctaacctgggactcgaaatttccatacattgcccctgccacacttttcagccgaatggcgatatcttggaaaacatccacgaagtcatggaaatcaaattcaagggtgtcgacaacgaagatgatcatggcagaggtgacttggggcggctcaagaagcagaaagaccatcacaatccgcatctcatcctcatgatgatcccaccgcacagactggataacccaggacaggggggccagagaaaaaagcgcgcactggacaccaactactgcttccggaacctcgaagaaaattgttgcgtccggccactgtacattgacttcaggcaggacctgggatggaaatgggtgcatgagccgaagggctattacgccaacttctgctcaggaccgtgtccgtacctgcgcagcgccgataccacccactctactgtgctcgggctctacaacaccctgaacccagaagcgtccgcgtcgccgtgttgcgtgccacaagatctcgagccgctcactatcctgtattacgtgggacgcaccccgaaagtggagcagctctcaaacatggttgtgaaatcatgcaaatgttca

SEQ ID NO: 20182 - DNA, 1236 bp, synthetic construct
  misc_feature 1..1236: note = source = /note="Description of Artificial Sequence: Synthetic coding sequence"
  source 1..1236: mol_type = other DNA
atgaaaatgcacctccaaagagcccttgtggtgcttgccttgctgaatttcgcaaccgtgtcactctcactgagcacctgtactacgctcgattttggccacataaagaaaaaacgggtggaagcaatcagagggcagatcctcagcaaactgcggctgactagccctccagaaccaaccgtgatgacccatgtgccctatcaagtcctggctctgtacaactcaaccagagaacttctggaagaaatgcatggtgagagagaggaaggatgtacccaggagaatactgagagcgaatactacgcgaaagaaatacataagtttgatatgattcagggtttggctgagcacaacgaactcgcagtgtgtcctaagggaattacttccaaagtgtttagattcaatgtctcttccgtggaaaagaataggacgaacctctttagagccgagttcagggtgctgcgtgtgcccaatccgtccagcaagcgcaatgaacagcgcattgaactgttccagatcctgcgtccagacgagcatatcgcaaaacagcgttacatcggtgggaaaaacctgcctactagagggacggccgagtggctgtcattcgatgtcactgatactgtccgggaatggctgttgcggcgggagtcgaaccttggactcgagatatctattcattgtccatgccatacctttcaacccaacggtgacatcttggagaatatccacgaagtgatggagattaagttcaagggggtggataatgaagatgaccatggcaggggagatctcggtagactgaaaaagcagaaggatcaccacaacccgcatcttatccttatgatgatacctccacacagactcgacaacccggggcagggaggccaacgaaagaagcgggcactcgataccaactactgttttagaaatcttgaagaaaactgctgtgtgcgtcctttgtacattgattttcgtcaagatctgggatggaagtgggtgcatgagcctaagggatactatgcgaacttctgttcagggccctgtccctacctgcgaagcgctgatactactcatagcaccgtgctgggtctgtacaacacccttaatcctgaggcctccgcctccccctgctgtgtgccgcaagacctggaaccactcactattctgtactacgtcggacgcactcctaaggtggagcagctttccaacatggtggtcaagtcatgtaaatgcagc

SEQ ID NO: 20183 - DNA, 1236 bp, synthetic construct
  misc_feature 1..1236: note = source = /note="Description of Artificial Sequence: Synthetic coding sequence"
  source 1..1236: mol_type = other DNA
atgaagatgcacctgcagcgggcactggtggtccttgcattgctgaatttcgctaccgtgtcactgtcactttcgacgtgtaccactctggactttggacacattaagaagaaacgggtggaagcaatcaggggtcagatcctttccaaattgcggttgacctctccacctgaacctactgtgatgacccatgtgccttaccaagtgctggccctgtacaattcaaccagagagctccttgaggaaatgcatggagaacgtgaggaaggatgtacccaagaaaacaccgaatccgagtactacgcaaaggaaattcacaagtttgacatgatccagggacttgccgaacacaacgaactcgcggtctgtccaaaagggatcacttccaaggtgtttcgcttcaatgtgtcctcggttgaaaagaataggactaacctgttccgcgcagaatttcgagtgctgagagtgccgaacccatcctccaagcgcaatgagcaacgaatcgagctttttcagattcttagacctgacgagcacatagcaaagcagaggtatattggaggcaaaaaccttcccacccggggtaccgctgagtggctgtccttcgacgtgaccgatactgtgcgagagtggctcctgagacgagaatcaaaccttggtcttgaaatatcaattcactgcccgtgtcatacctttcaacccaacggagacatcctcgaaaacatccatgaggtgatggagatcaaattcaaaggagtggataatgaggatgatcacggacgaggtgacctgggtagactcaagaagcaaaaagatcatcacaatccgcaccttatcctgatgatgatcccaccacatcggctggataatcctggacaaggtggacaacggaagaagcgtgcgcttgacacgaactactgtttcagaaaccttgaagaaaactgttgcgtgaggcccctttacatagattttcgccaggatcttggttggaagtgggtgcatgaacctaaagggtattacgcgaacttttgctcgggcccttgtccttacctgaggtcggcagacactacccactcgactgtgctgggactgtacaataccctgaacccagaggcctcagcctccccatgttgcgtgccccaggatcttgaacccttgactatcctctactacgtcggcagaacccctaaggtcgaacaactttcgaacatggtggtgaagtcgtgtaagtgtagc

SEQ ID NO: 20184 - DNA, 1236 bp, synthetic construct
  misc_feature 1..1236: note = source = /note="Description of Artificial Sequence: Synthetic coding sequence"
  source 1..1236: mol_type = other DNA
atgaaaatgcaccttcaacgagcccttgtcgtgctggcccttctgaactttgcaaccgtttcgctgagcctctcaacctgtaccactcttgatttcggacatatcaagaagaagagggtcgaagcaatccgcggtcagattctgagtaagctgagactcacctccccaccggaacctaccgtgatgacccatgtgccttaccaagtgctcgcactttacaacagcactcgcgaacttctggaagaaatgcacggggaaagggaggagggatgcacccaggagaacaccgagtcggaatactacgcaaaagaaatccacaaattcgacatgattcaaggtctggcagaacacaatgagctggccgtctgtcctaagggcatcacttcaaaagttttccgctttaacgtgtcgtccgtggagaagaacagaaccaaccttttccgcgcggagtttagagtcctgcgtgttcctaatccttcctcgaaaagaaacgagcagaggatcgagttgtttcagatcctcagacccgatgagcatatagctaagcagcgatacattggggggaaaaatctgccaactaggggaaccgccgagtggctgtcgtttgatgtcactgatactgtccgggagtggctgcttagaagagagtcgaatctggggctcgagatcagcattcattgcccctgtcacaccttccaacctaatggagacattctcgaaaacattcatgaagtgatggagattaagttcaagggagtggataatgaggacgaccatggaagaggtgaccttggacgcctgaaaaaacaaaaggaccatcataatccacatttgatccttatgatgatccctccccaccgtctcgacaatcctggacagggaggacaacggaaaaagcgggcactggataccaattactgttttcgcaaccttgaagaaaactgctgcgtgcgccctctctatatcgactttagacaggatctcggatggaaatgggtgcatgaacccaagggttactatgcaaatttctgttcaggtccatgtccatacctcaggagcgcagacaccacccactccactgtgctgggcctttacaataccttgaaccccgaagcatcagcgtcaccttgctgtgtgcctcaggacctggaacctttgaccatcttgtactacgtcggacggacccctaaggtggagcagttgtccaacatggtcgtcaagtcatgtaagtgtagc

SEQ ID NO: 20185 - DNA, 1236 bp, synthetic construct
  misc_feature 1..1236: note = source = /note="Description of Artificial Sequence: Synthetic coding sequence"
  source 1..1236: mol_type = other DNA
atgaagatgcatctgcagagagccctggtggtgttggccctcctgaatttcgcgactgtttctctgagtctgagtacttgtaccactcttgattttggtcatattaagaaaaagcgcgtcgaagcgattcgcggccaaatccttagcaagcttaggctcacttctcctccagagccaactgtgatgacgcacgttccttatcaagtcctggccctatataattctacacgagaactgctggaagagatgcatggagaacgtgaagaaggttgcacgcaggagaacacggagagcgaatattatgcgaaagagatccacaaatttgacatgattcaaggtctcgccgagcataacgaacttgccgtctgcccaaagggtattacaagcaaggtatttcgctttaacgtaagcagcgtcgaaaagaaccgtaccaatctgtttcgagctgagtttcgcgtcctgagggtcccgaatccttcgagcaagcgcaatgaacaacgaattgaactgtttcagatcctgcgtccggatgagcatatcgcaaagcagcgctacatcggcggtaaaaacctgccgactcgggggaccgcagagtggctgagtttcgacgtgaccgacaccgtgcgggagtggctgttgcgcagagaaagcaatctgggcttggagattagcattcattgtccgtgccataccttccaaccgaacggtgatatcctggagaacatccacgaggtcatggagattaaattcaagggtgttgacaatgaggacgaccacggacgtggagatctaggtcgtctcaagaaacaaaaagatcatcacaatcctcatctgattctgatgatgatcccgcctcaccgcctggacaaccctggccaaggtggtcaacgcaagaagcgagctctggatacaaattactgctttcgcaacctggaggaaaactgctgtgttcgcccgttgtatatcgacttccgccaggatcttggttggaaatgggttcacgagccaaaaggatattatgccaacttctgtagcgggccgtgtccgtaccttcggagcgcggatactacccacagcactgtgttaggtctatataacactctgaatcctgaggcgagcgcgtctccatgctgcgttccgcaggatctggagccactgaccattctgtattacgtgggtcgcacccctaaagtggagcagctcagcaatatggtggttaaatcctgcaaatgcagc

SEQ ID NO: 20186 - DNA, 1236 bp, synthetic construct
  misc_feature 1..1236: note = source = /note="Description of Artificial Sequence: Synthetic coding sequence"
  source 1..1236: mol_type = other DNA
atgaagatgcacctgcagcgggcgctggtcgttctggcgctgcttaactttgcaaccgtgagcctcagcctctcgacttgcaccacccttgactttggccatatcaaaaagaagagggtcgaggccatccgggggcaaatcctgtcaaagctgcgactgacctcgccgccagagcctacggtcatgactcatgtcccataccaggtcttggctctttacaactccactcgtgaactcctcgaagaaatgcatggagagagagaagaagggtgcacccaagagaacactgagtcggaatactatgctaaggaaatacataagttcgatatgattcagggactggccgaacataatgagcttgcggtgtgcccaaaaggtatcacctcgaaagtgttcagattcaatgtgagctcggtggagaaaaaccgcacgaatctctttcgagcagaattcagagtgctgagggtgcctaacccctcgtcaaagcggaacgagcaaaggattgaactgttccagatccttagaccagatgaacacatcgcgaaacagcggtacatcggaggcaaaaacctccccactcggggaactgccgagtggctgtcattcgacgttaccgataccgtgcgcgaatggctgcttcgccgtgaatctaatcttggactcgaaatctctatccactgcccgtgccacactttccagccaaacggtgacattcttgagaacatccacgaagtgatggaaatcaaattcaagggagtggataatgaggacgatcacgggcgcggcgaccttggaagattgaagaagcagaaggatcaccataatccacatctcatcctgatgatgatcccgcctcaccggctggacaacccgggccagggtggacagcggaagaagagagcgctcgacactaactactgctttcggaatctcgaggaaaactgctgcgtcagaccgctgtacattgacttcaggcaagacctgggatggaaatgggtccacgagcccaagggatactacgccaatttctgttcgggcccctgtccttatctgcgcagcgcagacaccacccactccacggtgctgggattgtacaatacgctcaacccagaggcatcggcctccccgtgctgcgtcccacaagatttggagccccttaccatcctctactacgtggggcgaactccgaaggtggaacaactgtctaacatggttgtgaaaagctgtaagtgttcc

SEQ ID NO: 20187 - DNA, 1236 bp, synthetic construct
  misc_feature 1..1236: note = source = /note="Description of Artificial Sequence: Synthetic coding sequence"
  source 1..1236: mol_type = other DNA
atgaagatgcacctgcagcgggccttggtggtcttggctctgcttaacttcgccaccgtcagcctttccctgtcgacctgtaccactctcgatttcgggcacatcaaaaagaagagggtcgaagccatccgcggtcagattctgtcgaaactgcgcttgacttcgccaccagaaccaaccgtgatgactcacgtgccataccaggtgctggctctctacaactcgactagagagctgctcgaagagatgcatggagaacgcgaagaggggtgcacgcaggaaaatactgaatccgagtactatgcgaaggaaatacacaagttcgacatgatccagggattggctgagcataacgagctggcggtgtgcccaaagggaattacttcgaaggtgtttcggttcaacgtgagctcggtggaaaagaaccggaccaacctgttccgcgcggagttccgggtgctccgagtgccaaatccatcgtcaaagcggaacgaacagcgcatcgaactgtttcaaatcctgcgcccggacgaacatatcgccaaacaacgctacatcggaggcaagaatcttccgaccaggggaactgctgagtggctctcgtttgatgtgactgacaccgtccgtgaatggctgctccgtagagagagtaatctgggactcgagatctccatccattgcccatgccatacttttcagccgaacggcgatatcttggagaatattcatgaggtcatggagatcaagttcaagggagtggacaacgaggatgaccacggaagaggagatctgggtcgtctgaaaaaacagaaggaccaccacaacccgcacctcatcctcatgatgatcccgcctcacaggctcgacaatccgggacagggtggccagcgaaagaagcgggccctggatactaattactgcttccggaacctggaagagaactgctgcgtgcggccactctacatcgactttcggcaggacctcgggtggaaatgggtgcacgagcccaagggatactacgccaatttctgctccggcccctgcccgtacctgagatcagccgataccactcattccaccgtgctgggactttacaacactctgaatccggaagcatcggcgagcccgtgctgtgtccctcaggatctggaaccactgactatcctctactacgtgggaaggactcctaaggttgagcagctgtctaacatggtggtgaagagctgcaagtgctcg

SEQ ID NO: 20188 - DNA, 1236 bp, synthetic construct
  misc_feature 1..1236: note = source = /note="Description of Artificial Sequence: Synthetic coding sequence"
  source 1..1236: mol_type = other DNA
atgaagatgcacctgcaacgagccctggtggtactggctctgctgaattttgctacagttagcctgtctctgtccacatgtaccactctggattttggacacataaaaaagaaaagggtcgaagcaatcaggggacagattctttctaagctgagacttacctctcctccagagcctaccgtgatgacccacgtgccatatcaggtgctggccctgtataatagcacgagagagctcttggaagagatgcatggagaacgcgaggagggctgcactcaggagaatactgagagcgagtactatgccaaggaaatccacaaattcgacatgatccaggggctggctgagcacaacgagctcgcagtgtgcccaaaaggaatcaccagcaaggtgtttcggttcaatgtttcttccgttgagaaaaacaggaccaacctcttccgggctgaattcagagtcctcagagtcccgaatccatcctccaagcgtaatgaacagcgtattgaactgttccaaattttgaggcctgacgagcacatcgctaaacagcggtacatcgggggcaagaatcttccaactagggggacagccgagtggctctctttcgacgtgacggataccgtaagggagtggttgctgagaagggaatcgaacctgggcctggagatatcgattcactgtccctgtcacacctttcagcccaacggcgacatcctggagaacattcacgaggtgatggaaatcaagtttaaaggcgtggacaacgaggatgaccatggcaggggcgatctcggacgactgaagaagcagaaggatcaccataatccacatctcatcctgatgatgataccgccgcatagactggacaatcctgggcaaggcggccagcggaagaagagagctctagatacgaattattgcttcaggaacctcgaggaaaactgttgcgtccgacctctgtatattgactttcggcaggacctgggctggaagtgggtgcatgaacccaaagggtattatgccaacttctgcagcggaccatgtccataccttcgttcagctgatacgacccacagcacggtgctgggattatacaacacactgaatcccgaggcttctgcaagcccttgctgtgttccccaggatcttgaacctctgacgatcctatactacgtaggacggactcccaaagttgagcaactgagtaacatggtcgttaaaagctgtaagtgttcc

SEQ ID NO: 20189 - DNA, 1236 bp, synthetic construct
  misc_feature 1..1236: note = source = /note="Description of Artificial Sequence: Synthetic coding sequence"
  source 1..1236: mol_type = other DNA
atgaagatgcacttgcagagggcgttggtcgtgcttgcacttctgaacttcgccactgtgtcactgtcgttgagcacctgcaccactctggactttgggcacatcaagaaaaagcgggtcgaagctatacgtggacagattttgtccaaacttagactgaccagcccacctgagcctactgtgatgactcatgtgccttaccaagtgcttgcattgtacaatagcacccgtgaactgctcgaagaaatgcatggagaaagagaagagggctgcacccaagaaaacaccgagtccgagtactacgctaaggaaattcacaaatttgatatgattcagggactcgcagaacataacgagttggccgtttgtcctaagggaatcacctccaaagtgttccgctttaatgtgtcaagcgtggaaaagaaccggaccaatctgttcagagcagaattcagagtgctcagagtccctaatccatcctcgaagagaaatgagcaacgcatcgaactctttcaaatacttcgccctgatgagcacattgccaagcagaggtacattggcggcaagaaccttcccaccagaggcacggcagaatggcttagctttgacgtgactgacaccgtgcgtgaatggctgctgcgtcgcgaatcgaacctggggctggagatatccatccattgtccttgtcatactttccaaccaaatggtgatattctggaaaacattcacgaagtcatggaaatcaagttcaagggtgtcgataacgaggatgatcacggacggggtgatttgggaagattgaaaaagcagaaagatcaccataacccacacctgatcctgatgatgatccctccccatagactcgacaaccctggtcaaggtggacaaaggaagaagagagcactggacactaactactgttttagaaacctggaggagaattgttgcgtgcgcccactttacattgactttcgacaagacctcgggtggaagtgggtgcatgaacctaaaggctattacgcaaacttctgttctggcccttgtccttacctgagatctgcagataccacccattcgacggttctgggactttacaacaccctcaaccctgaagcatcggcatccccgtgctgtgtgccacaagatttggagcctctcactatcctctactacgtcggtcgtaccccaaaggtggaacagctctcaaatatggtggtcaagtcgtgcaaatgctcg

SEQ ID NO: 20190 - DNA, 1236 bp, synthetic construct
  misc_feature 1..1236: note = source = /note="Description of Artificial Sequence: Synthetic coding sequence"
  source 1..1236: mol_type = other DNA
atgaaaatgcatctccagagagccttggtagtcctggccctccttaatttcgccaccgtgagcctatccctcagtacgtgcacgaccctcgacttcggccacattaaaaagaagcgggtggaagccatacgaggccagattctgtctaagttacgtcttacctctcctccagaacccaccgtgatgacgcacgtgccataccaggttctggccctgtataatagtacgagggaactgctggaggagatgcacggcgagagagaagagggttgtacccaggaaaacaccgagagcgagtattatgcaaaagaaatacataaatttgacatgatccagggactagcagaacacaacgagttggcagtgtgcccgaaaggcatcacgtccaaggtattccgcttcaatgtgtccagcgttgaaaaaaatcgtaccaacctgtttcgggccgaattcagagtcctgcgcgtgcccaatccaagctctaagcgcaacgagcagcgaatcgagctgtttcagatcttgagacccgacgagcacatcgctaagcagcgttacataggcggaaagaacttgcctacccgcgggacggcggagtggctaagctttgacgtgaccgacaccgttcgagagtggctgttgaggcgtgagagcaacctgggcctcgagatttctatccattgcccttgccataccttccagcctaacggtgacatcctcgaaaatattcatgaggtgatggaaattaagttcaagggggtggacaacgaggatgatcacggacgcggtgacctgggtcgtctgaagaaacaaaaggaccaccataacccccatctgatcctgatgatgatcccaccacacagactggacaaccccggtcaaggaggccagcggaaaaagagggctctcgacaccaattattgctttcggaatctggaggagaactgctgcgtgagaccactttacatagactttagacaggatctcggctggaagtgggtccacgagccaaaggggtattacgcaaatttttgttccgggccatgtccctatcttaggtcagcggacaccacccatagtactgtgctgggactttacaacacactcaaccccgaagcttccgcctctccatgctgcgtgccacaggatctcgaacccctcacgatcctgtattatgtgggtaggaccccaaaggtagaacagctatccaacatggtagttaaatcttgcaagtgctcc

SEQ ID NO: 20191 - DNA, 1236 bp, synthetic construct
  misc_feature 1..1236: note = source = /note="Description of Artificial Sequence: Synthetic coding sequence"
  source 1..1236: mol_type = other DNA
atgaagatgcacctgcagcgggccctggtggtccttgctctgctgaatttcgccacggtgtcgctgtccctgtccacctgcactactctggacttcggccacatcaagaagaagcgggtagaggcgatccggggtcagatcctttcaaagctcaggcttacctcgcctcccgagccgaccgtgatgacccacgtgccatatcaagtccttgctctctacaactcaactagagaactgcttgaggaaatgcatggtgagcgggaagaagggtgcactcaggaaaatacggagtcggaatactacgccaaggaaatccacaagttcgacatgatccaagggctggcagaacataatgaactggccgtgtgcccgaaaggtatcacctcgaaggtgtttcgtttcaacgtgtcaagcgtcgaaaagaatcgcacgaacctgttcagagcggagttccgagtcctccgggtgccgaatccttcctcaaagaggaacgagcagcgcatcgaactgttccagatcctgcgacctgacgaacatattgcgaaacagagatacatcggcggaaagaacttgccgacccgaggcactgcggaatggctctcattcgatgtcactgatactgtcagggaatggctcctcaggcgggaatcgaatttgggcctggagatctctatccattgcccgtgccacacctttcagccaaatggggacatcttggagaacatccacgaggttatggaaatcaaattcaagggcgtggacaatgaggatgatcacggtcgcggcgatttgggccggctgaagaagcaaaaggaccaccataacccacacctgatcctgatgatgatcccgccgcaccgcctcgataacccgggacaaggaggacagcgcaaaaagcgggcacttgacaccaattactgcttcaggaacctggaagaaaactgctgtgtgaggccattgtacatcgactttcggcaagacctgggctggaagtgggtccacgagcctaagggatactacgcgaacttttgctctggaccatgcccgtacctgcggagcgctgacaccacccattcaactgtccttggactgtacaacaccctgaacccggaagcgtccgccagcccttgctgcgttcctcaggacctggagccgctcaccattctgtactacgtgggccggactccaaaggtggaacaactctcgaacatggtggtcaagtcatgcaagtgttca

SEQ ID NO: 20192 - DNA, 1236 bp, synthetic construct
  misc_feature 1..1236: note = source = /note="Description of Artificial Sequence: Synthetic coding sequence"
  source 1..1236: mol_type = other DNA
atgaagatgcacctgcaacgggccctggtcgtcctggcacttctcaatttcgcaaccgtctccctgtcactctcaacttgtacgacgctcgactttggacacataaagaagaaacgcgtcgaggctatccggggtcagatcctctcgaagctgcggctgacttcaccgcccgaaccaacggtgatgactcacgtgccgtaccaggtcctggccttgtacaattcgacccgcgagttgctcgaggagatgcacggagagcgggaggagggatgtacccaagagaacactgaaagcgaatactatgccaaagagatccataagttcgatatgattcaggggctggccgaacataatgaactggctgtgtgcccgaagggaatcacttccaaagtttttcgcttcaacgtcagctcggtggaaaagaatcggactaatttgttccgggcagaattccgtgtgctgagggttccgaatccctcgtccaagcgcaatgaacagaggatcgagcttttccagatccttagaccagacgaacacatcgccaagcaaagatacatcggcggcaagaacctgccgaccagagggactgccgaatggcttagcttcgacgtgaccgacactgtgcgggagtggctcctgcggcgcgaatctaacctggggctggaaatctccatccactgcccgtgccacaccttccagcccaatggcgacatcctcgaaaacatacacgaagtgatggagatcaaattcaagggggtcgataacgaagatgatcacgggcgcggcgacttgggcagactgaagaagcaaaaagaccaccacaacccccatctcatccttatgatgatcccaccgcaccgactcgacaatccaggacaaggcggacagcgaaagaagagggccctggacaccaactactgctttaggaacctggaggagaactgctgcgtgcggccgctgtacatcgattttcggcaggacctgggatggaagtgggtgcacgagccgaagggctactacgcgaacttctgcagcggtccctgcccgtacttgcgctcggcggacaccacccactcgactgtcctgggactgtataacactttgaacccagaagcctctgccagcccatgctgtgttccgcaggaccttgaacctttgaccatcctctattacgtcggaaggacccccaaggtggaacaactgtccaatatggtggtcaagagctgtaagtgctcg

SEQ ID NO: 20193 - DNA, 1236 bp, synthetic construct
  misc_feature 1..1236: note = source = /note="Description of Artificial Sequence: Synthetic coding sequence"
  source 1..1236: mol_type = other DNA
atgaaaatgcatcttcagcgtgcgctagtcgtgctcgccttgctcaatttcgcgaccgtgagtctaagcctgagtacgtgtacaacactcgactttggacatataaaaaagaaaagagtggaagctatccggggccaaattctgtctaaactgcgcctgacgtccccgccagaacccaccgttatgacccacgttccataccaggtgctggcgctatataactccacacgggagctgctcgaggagatgcacggggagcgggaggaaggatgcactcaagaaaataccgagagcgagtactatgccaaagagattcataaattcgatatgattcagggattggcggagcacaacgaactggctgtctgtccgaaggggatcacatctaaggtttttcgattcaatgttagctctgtggaaaagaaccggacgaacctgtttagagccgagttccgagtgctgagagttcccaacccttcttcaaagcggaacgagcaacgcattgagctgttccaaatattgcgtcctgatgaacacattgctaagcagcgctatattggcgggaaaaatcttcctacaaggggaactgccgaatggctcagttttgacgtgacagacacggtacgagagtggcttttacggcgcgagtcgaatctcggactggaaatttctattcactgcccttgccatacattccagccaaatggggatatcttggaaaacatccatgaggtgatggagatcaaattcaaaggcgttgacaatgaggacgatcacggacgcggagacctgggccggctgaagaaacagaaggaccaccataatccacacctgattttgatgatgatacccccccatagactggataatcctggacaggggggccagcgcaagaaacgtgctctcgacaccaactattgcttcagaaatctagaagaaaattgctgcgtaagacccctttacatagattttcggcaggatctgggttggaagtgggtgcacgagcccaaaggatattatgctaacttctgcagtggtccctgcccatatctccgatccgccgacaccacacacagtactgtgttgggcctgtataacacgctaaaccccgaggcctcagcttccccttgctgtgtgccccaggatttagagcccctcacgattctatattacgttggaaggacgccaaaagtggagcagttgtctaatatggtggtgaaaagctgcaagtgctct

SEQ ID NO: 20194 - DNA, 1236 bp, synthetic construct
  misc_feature 1..1236: note = source = /note="Description of Artificial Sequence: Synthetic coding sequence"
  source 1..1236: mol_type = other DNA
atgaaaatgcatttgcaacgcgcattggtggtactcgcgctgctaaatttcgcaactgtttctttgagtttgagcacctgtaccacacttgacttcgggcacattaagaaaaagagggtggaagctatccgcggacagatactgagtaagctgaggcttacatcgccccctgaacctaccgtaatgacgcacgtaccctatcaggtgctggccttgtacaacagtactcgagaactattggaggaaatgcacggcgaacgcgaggaggggtgcacccaggagaacacagagagtgagtactacgctaaggagattcacaagtttgatatgattcaaggtttggcggagcacaatgaactggccgtgtgtcccaagggaataacgagtaaagtgtttcgctttaatgtgtctagcgtggaaaagaaccgtaccaatctgttcagggcagaattccgagttctccgggtgccaaacccgtccagcaagcgaaatgagcagagaattgagctcttccaaattcttagacccgatgagcacatcgcgaagcagcggtacatcggcggcaaaaatctgcccaccaggggaactgccgaatggctttcctttgacgtgacagatacagtgcgagaatggctgcttaggagggagagtaatctgggcctggagatctctattcactgcccctgccacactttccaacccaatggggacattctggagaatattcatgaggtgatggagatcaagttcaaaggtgtggacaacgaggacgaccatggtcggggtgatctagggagacttaaaaagcagaaggatcatcacaatccacacttgatacttatgatgattccgcctcatcgcctggacaatccggggcagggggggcagagaaagaaacgggcactggacacgaactactgcttccgtaatctggaagagaactgttgcgtgcgacctctgtatatagactttagacaggatctgggctggaagtgggtccatgagcccaagggctattacgcaaatttctgtagcggtccgtgtccgtacctccgcagtgccgacaccacgcacagtacagtgctcggcctgtacaacacgttgaacccagaagcaagcgccagtccatgttgcgttccgcaagatctcgagccgttgacgattctctattatgtcggacgtacaccaaaggtggagcagcttagcaacatggtcgtgaagtcatgtaagtgttcc

SEQ ID NO: 20195 - DNA, 1236 bp, synthetic construct
  misc_feature 1..1236: note = source = /note="Description of Artificial Sequence: Synthetic coding sequence"
  source 1..1236: mol_type = other DNA
atgaagatgcatctacagcgggccctcgtggtgctcgccctgctcaacttcgctacagtgtcactgagcctctcgacatgtacaaccctggatttcggccacatcaaaaaaaagcgtgtagaggcaatcaggggccagatcctaagtaagctgcgtcttactagccctccggagcccaccgttatgacacatgtcccctatcaggttctggccctgtataattccaccagggaactgttggaggaaatgcacggcgaaagagaagagggatgtacacaggagaacactgagagcgagtactacgcaaaggagatccataagttcgatatgatccaagggttggccgagcataacgagctggctgtctgtccaaagggtattacatccaaggtgttcagatttaatgtctcaagtgtggaaaagaatcgcacaaatctgttcagggctgaatttcgcgtgctgcgtgtccctaatccctccagcaagagaaatgagcagcgcatcgaactttttcagattctaagacctgatgaacacatcgctaaacagcggtacatcggcggcaagaacctgccaacaagaggaaccgcagagtggttgagtttcgacgtcacagatactgtacgggagtggctgttgaggcgcgagagcaacctgggtcttgagatctccatccactgcccgtgccacaccttccaacctaacggcgacatcctcgagaatattcacgaagtgatggaaataaagttcaagggggtggacaacgaagatgatcacgggcgcggtgacctgggccggcttaagaaacagaaagaccaccacaacccacacctgatcctgatgatgattcctccccacagactggacaatcctgggcagggaggacagcgaaagaaacgggctctggatactaattactgtttcaggaatctggaggagaattgttgcgttaggcccctatacatcgacttcaggcaagacctcggatggaaatgggttcatgaaccgaaggggtattacgccaatttttgttctggcccttgtccttatttgagaagtgcggatacaactcacagcacagtactgggcttgtataacactctgaaccctgaggcctctgctagcccttgttgtgttcctcaagacctcgagccgctcaccattttgtactatgtcggtagaactccaaaggtagagcagttgtctaacatggtcgtcaagtcctgcaaatgttct

SEQ ID NO: 20196 - DNA, 1236 bp, synthetic construct
  misc_feature 1..1236: note = source = /note="Description of Artificial Sequence: Synthetic coding sequence"
  source 1..1236: mol_type = other DNA
atgaaaatgcaccttcagcgcgccttagtggtcctggccctgctaaactttgctactgtgagcctaagcttgtccacctgtaccaccctcgattttggtcacatcaagaaaaagcgtgttgaagctattcgaggccaaatcctgtctaagctgaggctgaccagtccccctgagcccacagttatgactcacgtgccgtaccaagtcttagcactgtataactctacacgggagctcttagaagaaatgcacggcgagcgtgaggaggggtgcacacaggaaaacaccgaatctgagtactacgccaaggagatccacaaattcgacatgatacagggcttggctgaacacaacgagttggccgtttgtccgaagggcattacctccaaggttttcaggttcaacgtgtcctcagtggagaaaaataggaccaatctttttcgcgccgaatttagggtgctcagagtgccaaacccctcctccaagcgcaatgagcagcggatagaactatttcagattttacggccagatgaacatattgccaaacagaggtacattggtgggaagaatctccccacccgaggtaccgcggagtggttgtcatttgatgtcactgacacagtgcgcgaatggctcctgcggcgggaaagcaatctggggctggagatctccattcattgcccgtgtcacacctttcagcctaacggggacattttggagaatattcacgaggtgatggaaatcaagttcaaaggggttgataatgaagacgatcacggtcgtggcgatcttggtcggctgaaaaaacagaaagaccaccacaacccccatctcattctgatgatgatccctccgcataggctggataatcccgggcagggaggtcagcggaagaaacgcgcgctggatactaactattgtttccgcaacttggaagagaactgttgcgtgagacctctctatatcgatttcagacaagatttgggatggaaatgggtgcacgagccaaaaggctattatgcgaatttctgtagtggcccctgtccttatctaagaagtgcagacaccacccattctactgttcttggcctgtacaacaccttaaaccctgaggcaagtgcaagcccttgctgcgtgcctcaagatctggagccgctcacaattttatactacgtagggcgcacgccaaaagtggagcagctttccaacatggttgtgaaatcttgtaaatgttct

SEQ ID NO: 20197 - DNA, 1236 bp, synthetic construct
  misc_feature 1..1236: note = source = /note="Description of Artificial Sequence: Synthetic coding sequence"
  source 1..1236: mol_type = other DNA
atgaaaatgcatctgcaacgagcattggtggtgcttgctctcctcaactttgctaccgtgagtctctccctgtctacgtgtaccacactcgacttcgggcacatcaaaaagaaacgggtggaagccatccgaggacagattctttccaagttacgactgacttccccgcctgagccaaccgtcatgacccatgtaccctatcaggtcctggccttatataactctacgcgagaactgttagaagaaatgcacggggagcgggaagaaggctgtacacaagagaacactgagtccgagtactatgctaaggagatccacaagttcgatatgatccagggccttgccgaacacaatgagctggctgtgtgtcccaaaggcattaccagcaaagttttccggttcaacgtcagttcagtggaaaagaatcgaaccaatttgttcagggccgaatttcgcgtgctgagagttcccaacccctcatcgaagagaaacgaacagcgcatcgagctgtttcaaatcctgaggccggacgaacatatcgcaaaacagaggtatattggcggtaagaacctgccgacaagaggcacggcggagtggctcagcttcgacgtgactgacaccgttagagagtggttattgagacgagagtccaacttagggctagagatcagcattcattgtccatgtcataccttccagcctaacggagatattctggaaaatatccatgaagtcatggagataaaatttaagggggttgacaacgaggacgaccacggcagaggtgacctaggacggctgaaaaagcagaaagatcatcataatcctcaccttatactaatgatgatccctcctcataggctggataatcctggccaggggggccaaaggaagaaacgggcactcgacaccaactactgcttcagaaacctagaagaaaactgctgcgttcgccctctctatattgacttcagacaggacttagggtggaagtgggttcacgaacctaaggggtactacgcgaatttctgctctggcccatgtccttatctgcggagtgcagacactactcactcaaccgttctcggactgtacaacacactcaacccggaagccagcgcctcaccatgctgtgttccacaggatctcgaacctttgaccattctgtattacgtggggaggacacccaaggttgaacaactgtctaacatggtggtcaaatcttgcaagtgttca

SEQ ID NO: 20198 - DNA, 1236 bp, synthetic construct
  misc_feature 1..1236: note = source = /note="Description of Artificial Sequence: Synthetic coding sequence"
  source 1..1236: mol_type = other DNA
atgaagatgcatcttcagagggccctggtggtgctcgctctcctcaattttgcaaccgtcagcctttctcttagtacttgcactacactggatttcgggcatatcaagaagaaacgcgtagaagcgatccgcggacaaattttgtcaaaactcaggctgacaagcccccctgaaccgaccgttatgactcacgtaccctatcaggtgctggccctgtataatagtaccagggagttactagaggagatgcatggagaaagagaggaagggtgcacccaagagaacaccgaaagtgagtattatgcgaaagaaattcacaaatttgatatgattcagggcctggcagagcacaacgaactggccgtgtgtcccaaaggaataacatcgaaggtcttccgtttcaacgtttcttcagtcgaaaaaaatagaaccaacctgttccgggcagaatttcgcgtactgcgcgttccaaacccatctagcaaacggaatgaacagcggattgagcttttccagatcctgcgaccagatgagcatatcgcaaaacaacgctacatcggggggaaaaacctgcccacacggggtaccgccgagtggttgagtttcgacgtgaccgacactgttagagagtggctgctcaggagagagagcaatttgggcctggagatttccatccattgtccctgtcacacatttcagccgaatggggatattctcgaaaatattcatgaggtgatggaaatcaagttcaaaggcgttgacaatgaggacgatcacggccggggagaccttggccgactaaagaagcagaaggatcaccacaacccacacctgatattaatgatgatccctccgcatcgcttggataaccctggccagggtggccagcggaagaagcgggccctagatacaaactattgtttccgcaacctcgaagaaaattgctgcgtaagaccactttatatcgacttccgacaggacctcggatggaagtgggtgcatgagcccaaaggctactacgctaacttctgctccggcccatgtccttacctcagaagcgccgataccactcacagcacggtactagggctgtacaacacattgaacccagaggcctctgccagtccctgttgtgtgcctcaggacctcgaaccactcaccatcttatactatgtgggtcgcacacccaaggtggagcagctttccaatatggtcgtaaagtcatgcaagtgttct

SEQ ID NO: 20199 - DNA, 1236 bp, synthetic construct
  misc_feature 1..1236: note = source = /note="Description of Artificial Sequence: Synthetic coding sequence"
  source 1..1236: mol_type = other DNA
atgaagatgcatctccagcgggctctggtggtgttagcgctgctgaatttcgcaaccgtaagcctctcactttcaacatgtacaactctcgacttcggtcacattaaaaaaaagcgagtcgaagccatcagaggacagatcctgagtaaactacggctgacttcaccccccgagccaacagtcatgactcatgtaccctaccaggttttggcactgtacaactcaacccgcgagctgctcgaggagatgcatggagagagggaagaaggctgtactcaggagaacacagaatcagagtactatgctaaagaaatacacaagtttgatatgattcagggcctcgccgagcacaacgagttggcagtctgccccaagggcatcacaagtaaagtgtttaggttcaacgtgagctccgttgagaagaatagaaccaaccttttcagagccgagttcagggtcctgcgcgttcccaatccctcttctaagagaaatgaacagaggatcgagctgtttcagattttaaggcccgacgagcatatcgccaagcagcgctatatcggtggcaagaacctgcccacccgggggactgctgagtggctgagcttcgatgtgaccgatacagtacgtgagtggctgctacgtcgggagtcgaacttagggctggagatctccattcattgtccctgccacaccttccagccaaatggcgacattctggaaaatatccatgaagtcatggaaattaaatttaagggggttgacaacgaggatgatcatggtcgaggagatctcgggagactgaagaagcaaaaggatcatcataacccccacctgattctcatgatgataccaccacatcggctcgacaacccagggcaaggcggccagcggaaaaagcgagctcttgacactaactattgctttaggaacttggaagaaaattgctgtgtccgccctctctacatcgattttcgtcaggacctcggttggaagtgggtacacgaacccaagggctattacgccaacttttgcagcggcccttgtccctatctgcgttcagccgatactactcatagcacggtccttgggctctacaacactctcaacccagaggcctctgcatcaccatgctgcgttccacaagacctggagcctctgaccattctctactatgtgggccgtactcccaaggtggaacaactgtcaaatatggtggtcaagtcttgtaaatgctcc

SEQ ID NO: 20200 - DNA, 1236 bp, synthetic construct
  misc_feature 1..1236: note = source = /note="Description of Artificial Sequence: Synthetic coding sequence"
  source 1..1236: mol_type = other DNA
atgaagatgcatctgcaaagagctctcgtggtgcttgccctgttgaattttgcgacggtgtcactctccctgtcgacttgcaccaccttggattttggccatatcaaaaagaagagggtagaggcaatccgcggccaaatcctctcaaagctgcgcctcacttcaccgcccgaacccaccgtgatgacgcacgtcccttaccaggtgctggctttgtacaactctactcgcgaactgctggaggagatgcacggcgaaagagaagaaggatgcacccaggaaaacacggaaagcgaatactacgcaaaagagatccacaaatttgacatgatccagggtctggctgagcataatgagctggccgtctgcccgaaggggatcaccagcaaggtgtttcgcttcaatgtgtcctccgtggaaaagaaccggaccaacctgttcagagccgagttcagagttctccgtgtgccgaacccatcgtccaagcgcaacgaacagcggatcgaactgtttcaaatccttagaccggacgagcatattgccaaacaaagatacattggaggaaaaaacctgcctacccgaggcactgccgagtggctgtcgtttgacgtgaccgatacggtgcgggaatggctcctgagacgcgagagcaatctgggacttgagattagcatccactgtccgtgccatacgtttcaacccaatggcgacatccttgaaaacatccacgaggtcatggagatcaaattcaaaggagtcgacaacgaagatgatcacggtagaggagatctcgggcggcttaagaagcagaaagaccaccacaacccgcacctcattttgatgatgatcccgcctcatcgactggacaatcctgggcaggggggacagcgcaagaaaagagcgctggataccaactactgtttcagaaacctcgaagagaattgctgcgtgcgaccgttgtacattgacttcagacaggatctgggatggaagtgggtgcacgaacccaagggatactacgcgaatttctgcagtggaccatgtccttatctgagatcggccgacaccactcactccaccgtgctgggcctgtacaacaccctgaaccctgaagcctccgcgtcgccgtgctgcgtcccacaggatctggaacccctcacgatcttgtactacgtcggacggactccgaaggtggaacaattgtcgaacatggtggtgaagagctgcaagtgctcg

SEQ ID NO: 20201 - DNA, 1236 bp, synthetic construct
  misc_feature 1..1236: note = source = /note="Description of Artificial Sequence: Synthetic coding sequence"
  source 1..1236: mol_type = other DNA
atgaagatgcatctccaacgggcgttggtcgtgctcgcactgctgaactttgctactgtgagcctttcgctttcgacctgtaccaccctggacttcggacacattaagaaaaaacgagtcgaagcaattcgcggccagatcctgtccaagctcaggcttacctccccgcccgaacccaccgtgatgactcatgtgccttatcaggtcctggccctttacaactcgactagggaactgcttgaagaaatgcacggggagcgggaagaaggatgtactcaggagaataccgaatcagagtactacgccaaagaaatacacaagtttgatatgatccaaggactggcggagcataatgaattggcagtctgccctaagggtattacctccaaagtctttcgttttaacgtgagctccgtagagaagaatcgaacgaatctgttccgtgctgaattccgggttcttagagtgcctaacccttcgtcgaagagaaatgaacaaagaattgaactttttcagatcttgcggcctgatgagcatatcgcaaagcagagatacattggtggaaaaaaccttcctacccgtggaaccgcagaatggctctcatttgacgttactgacactgtgagagagtggcttctccgtagagagtcgaacctgggcctggagattagtattcactgtccatgccacaccttccagcctaatggagatattctggagaacatccatgaagtgatggaaatcaagtttaagggtgtcgacaacgaagatgaccatggacggggcgatcttggacggctcaaaaaacaaaaagatcaccataatccccatctgatacttatgatgataccacctcaccgactggacaacccaggacagggtggtcaaagaaagaagcgagcactggataccaattactgttttaggaacctggaagaaaactgttgcgtacgcccgttgtacattgattttcgacaagacctgggctggaaatgggtccatgaacccaagggctactacgccaacttctgtagcgggccatgcccatacttgcggagtgcagatacgactcattcgactgtactcggtctgtacaacactctcaacccggaggcatcggcgtcaccatgttgcgtgccacaagatctcgagccgcttacgatcctttactacgtgggcaggacccctaaggttgagcaactcagcaatatggtggtgaagtcctgtaagtgttca

SEQ ID NO: 20202 - DNA, 1236 bp, synthetic construct
  misc_feature 1..1236: note = source = /note="Description of Artificial Sequence: Synthetic coding sequence"
  source 1..1236: mol_type = other DNA
atgaagatgcatttgcaacgggccctcgttgttctggcgctgttgaatttcgccaccgttagcctctcgctgtcgacttgcaccacccttgatttcggacatatcaagaaaaagcgagtggaggcgatccgaggacagatcctttccaagctcagactgacttccccaccagagccaactgtcatgacccatgtcccctaccaggtgctcgctctctataactctacgagagaactgctggaggagatgcacggtgagcgggaagaaggctgcacccaggaaaacactgaatctgaatactacgcgaaggagatccacaagttcgacatgatccagggactggcggaacacaatgagctcgccgtgtgtccgaaagggatcacgagcaaggtgttccgcttcaacgtgagcagcgtcgagaaaaaccggaccaacctctttagggccgagttcagagtgcttagagtgcctaacccgagctcgaagaggaacgagcagcgcatcgagctgtttcagatcctgcgccctgacgaacacattgcaaagcaaagatacattggcggcaagaatctcccgacccgtggcactgctgaatggctgtccttcgatgtgaccgacactgtcagggaatggctgttgcgccgcgagtctaatctgggactggaaatctcaatccactgtccgtgtcacactttccaaccaaatggagacatactggagaacattcacgaagtgatggagatcaagtttaaaggagtggataacgaggatgatcacggccggggagatctcgggagactgaagaagcagaaagatcatcataacccacacctgatcttgatgatgattccgccgcaccggctggacaacccagggcagggaggacaaaggaagaagagggcactcgacactaattactgcttccgtaaccttgaagaaaactgctgcgtcagacctctgtacatcgactttcgacaggacctggggtggaagtgggtgcatgaaccaaagggctactacgctaatttctgctcaggaccgtgcccttacctcagatcggcggacaccacgcatagcaccgtcctgggtctgtacaacacgcttaatccggaagcctcagcctccccttgctgcgtccctcaagacctcgaaccgcttaccatcctgtattacgtgggccgcactcccaaggtcgagcaattgtcgaatatggtggtgaagtcatgtaagtgctcg

SEQ ID NO: 20203 - DNA, 1236 bp, synthetic construct
  misc_feature 1..1236: note = source = /note="Description of Artificial Sequence: Synthetic coding sequence"
  source 1..1236: mol_type = other DNA
atgaagatgcacttgcagagggctttggtggtgctggcgttgctcaatttcgcaactgtgagccttagcctgtctacctgcactactctggacttcgggcacatcaaaaagaagcgagttgaggccatcaggggacaaatcctgtcaaagctgcgcctgaccagcccaccagaacccacggtgatgacccacgtgccataccaggtgctggccctgtacaatagcacccgcgagctcctggaagaaatgcacggcgaaagagaagaaggctgcacccaggaaaataccgagtcggagtactacgctaaggaaatccacaaatttgacatgatccagggactggcagaacacaacgagctcgccgtgtgtcctaagggaatcacgagcaaggtgttccggtttaatgtgagctccgtggagaagaaccgcaccaatttgttcagggccgagtttcgggttctccgggtgccgaacccctcaagcaaacgcaacgagcagcggatcgaactcttccagattctccgcccggatgaacatatcgccaagcagaggtacatcggtggcaaaaacctcccgacgcggggaactgccgaatggctcagcttcgacgtgaccgataccgtgcgagagtggctcctcagacgggagtcgaacctgggtttggagatctctatacactgcccatgccacacttttcaaccgaatggcgacatcctggaaaacatccatgaagtgatggaaatcaaattcaaaggagtggataatgaagatgatcatggacgcggggaccttggacgccttaagaagcagaaggatcatcacaacccacaccttatcctgatgatgatccctccacacagacttgacaaccctggtcagggaggacaacgcaagaagagggccctggacactaactactgctttagaaacctcgaagagaattgttgtgtgcgcccgctctacatcgatttccggcaggacctgggatggaagtgggttcacgaacctaagggctactacgctaatttctgtagcggaccctgcccttacctgagaagcgcagacaccacccattccaccgtgctgggactgtacaacacgttgaaccccgaggcgtccgctagcccgtgttgcgtgccgcaagacctggaaccgctgaccatcctgtactacgtgggccgcaccccgaaggtcgaacagctctcgaacatggtggtgaagtcatgcaagtgctcg

SEQ ID NO: 20204 - DNA, 1236 bp, synthetic construct
  misc_feature 1..1236: note = source = /note="Description of Artificial Sequence: Synthetic coding sequence"
  source 1..1236: mol_type = other DNA
atgaagatgcacctccaacgcgccctcgtggtcctcgccttactgaacttcgcaacagtctccctgagtttgtctacctgtacaacactcgattttgggcatatcaaaaagaaaagggttgaggccatacgaggccagatcctatcaaaactgcgtctgacaagtccccctgagcctaccgtgatgacccacgtcccataccaggtgctcgcactttacaactctacccgggaactcctggaagagatgcatggcgaaagggaggaaggctgcacccaggaaaacacagagagtgaatactacgctaaagagattcacaagttcgatatgatccaaggactggcagagcataacgaactcgctgtgtgccctaaaggcatcacaagcaaggtcttccggttcaatgtaagcagcgtcgaaaagaaccggaccaacttgtttagagccgagttccgcgtcctgagggtgcctaatccatccagcaaaagaaacgaacagcggattgaactgttccagatcctcagaccagacgagcatattgcgaagcagaggtacattggcggtaagaacctccctaccagaggtaccgcagagtggctgagcttcgatgtgaccgacacagtgagagaatggctgctgaggagggaatccaacttgggcctcgaaataagcatacactgcccatgtcatactttccagccgaatggagacatcctcgagaacatccacgaggttatggagatcaagttcaagggagtggacaatgaagacgatcacggcagaggggatctgggccgcctaaagaaacaaaaagatcaccacaatccacacctgatcctaatgatgatcccccctcaccgcctggataatcctgggcagggggggcaacgcaagaagcgggctttggatacgaactactgcttcaggaatctcgaggaaaactgttgcgtgaggccactgtacattgactttcggcaagatctgggatggaagtgggttcacgaaccgaaggggtattacgctaacttctgctcaggaccatgcccttacttgagaagcgctgacaccacacacagcaccgtgctggggttatacaacacactgaacccggaagctagtgcatcaccttgttgcgtgccccaggatctcgagcctctcaccattctgtactatgttggccgcacccctaaagtcgagcaactctcaaatatggtagtaaagtcttgcaaatgtagc

SEQ ID NO: 20205 - DNA, 1236 bp, synthetic construct
  misc_feature 1..1236: note = source = /note="Description of Artificial Sequence: Synthetic coding sequence"
  source 1..1236: mol_type = other DNA
atgaaaatgcacctgcaaagagcactggtggtgttggcgttgttgaacttcgcaaccgtgtccctgtcgctgtccacgtgtacgactctggattttggacacataaagaagaagagggtggaggcaatcagaggtcaaatactttctaaactgcggttgactagtcctcccgagcccaccgtcatgacccatgtcccctaccaagtcctcgcactttacaactccactagagagctgctggaggaaatgcatggagaacgcgaggaaggttgcacccaggagaacactgaatcagaatactacgctaaggaaatccataagttcgatatgattcaaggactcgcagaacataacgagctcgccgtctgtccaaagggaattacctcaaaagtttttcggtttaacgtgagctccgtcgagaagaacagaaccaatctcttccgggccgagttcagggtccttagggtgcccaatccaagctccaaacgcaatgaacagaggattgagctttttcaaattcttcgacctgacgaacacatcgccaaacaacgttacattggaggtaagaaccttccgactcggggaaccgcggagtggctctcctttgacgtcaccgatactgtgagggaatggctgcttcggcgggaatcgaatcttggacttgagatttcaatccattgcccatgccacactttccaaccaaatggtgacatacttgaaaacatccatgaagtgatggagattaagttcaagggtgtcgacaacgaagatgatcacggacgcggagatctcggtagacttaagaagcagaaagatcatcataatccacacttgatcctgatgatgattccaccgcaccgattggataacccaggacagggaggccagaggaagaagagagcacttgacactaactactgttttcgcaaccttgaagaaaattgttgtgtgcgaccactctatattgactttcgccaagatctgggatggaaatgggtgcatgaaccgaaaggatactacgcaaacttttgttcggggccctgcccttaccttcggtcagcagataccacccatagtactgtgctgggactgtacaatacccttaatcccgaagcatcggcgtcgccttgttgtgtaccccaggatcttgagccactgactatcctctactacgtgggccgtacccccaaggtggagcaactgagcaacatggtcgtcaaatcgtgtaaatgttca

SEQ ID NO: 20206 - DNA, 1236 bp, synthetic construct
  misc_feature 1..1236: note = source = /note="Description of Artificial Sequence: Synthetic coding sequence"
  source 1..1236: mol_type = other DNA
atgaagatgcacctgcagcgggcgctcgtcgtgcttgcgcttctgaattttgcaaccgtctccctttcgctttcgacttgtacgactctggattttggacacatcaagaaaaagagggtggaggcaattcgaggacaaattctcagcaagttgcggcttacctcgcctcctgagcctactgtgatgacccatgtgccttaccaggtgctcgcactttacaattccaccagagaactgctggaagaaatgcatggtgaacgggaagagggatgcacccaggagaacaccgaaagcgaatactacgccaaggaaattcacaagtttgatatgatccaagggctcgcagaacataacgagctggctgtgtgccctaagggtattaccagcaaggtttttcgttttaacgtgtcaagcgttgaaaagaaccgtaccaacctttttagagcagaattcagagtgttgagagtgcctaatccttcctcgaagcgaaacgaacaaaggatcgagctgtttcagattttgcggcctgatgaacatatcgcaaaacaacggtacataggtggaaagaacctgcctactcgcgggactgcagagtggcttagctttgatgtgaccgatactgttagagaatggttgctgcgcagagaatccaatctgggccttgaaatttccatacactgtccctgtcatacttttcaaccgaacggagatattcttgaaaacattcatgaggtgatggagatcaagttcaagggtgtggataatgaggacgaccacggacggggcgatctcggcagactcaagaaacaaaaggaccatcataaccctcatctgatcctcatgatgatccctccgcatagactggacaatcctggacaaggaggacagcgcaaaaagcgagcacttgacactaactactgttttcgcaaccttgaagaaaattgctgcgtccgtcccctctacatagatttcagacaggatcttgggtggaagtgggtgcacgagccaaaggggtattacgcaaacttctgttcagggccatgtccatacctgagatcggccgatactacccattccactgtcctgggtctgtacaatactctgaaccctgaggcgtccgcttcgccatgttgcgtcccccaagatctggaacctctcacgatcctgtactacgtcggtaggactccaaaggtggaacaactgtcgaatatggtcgtcaagagctgtaagtgttcc

SEQ ID NO: 20207 - DNA, 1236 bp, synthetic construct
  misc_feature 1..1236: note = source = /note="Description of Artificial Sequence: Synthetic coding sequence"
  source 1..1236: mol_type = other DNA
atgaaaatgcacctccaacgagctcttgttgtcttggcccttctgaatttcgcaactgtttccttgtctctatcaacgtgtactaccctcgatttcggccacatcaagaagaaaagagttgaagcaatccgtgggcagattctttcgaagcttagacttacatctccaccagaaccgacagttatgacacacgtgccatatcaggtcctggctttgtataactctactcgtgaactccttgaagagatgcacggagagagggaagaaggttgcacgcaagaaaacacggaatctgagtattatgctaaagaaatccacaaattcgatatgatccagggattggcagaacacaatgagttagcggtctgtccgaaaggaattacaagcaaagtcttccggtttaatgtttcatcggtagaaaaaaatcgtacaaacctctttagagcagaatttcgtgtcctgagagtaccaaaccctagctcaaaaagaaatgaacaacggatagaactttttcaaatcttgagaccggatgagcatatagctaagcaaaggtatatcggaggcaaaaatcttccaacgcgtggaacagcagagtggctttcatttgatgttacggatactgtgagagaatggcttcttcgaagagaatccaacctgggtctggaaatatctattcattgcccctgccatacttttcaaccaaatggagatattctcgagaacattcatgaagtaatggaaattaaatttaagggagttgataacgaagacgatcacggaaggggagatctaggaagattgaagaagcagaaagatcatcataacccgcatctcatcctgatgatgattccaccacatcgcctcgataatccaggacaaggcggccagcggaagaaacgtgcattggatactaattactgcttccgtaatctggaagagaactgttgtgtccgaccactttatatcgatttcagacaagatttaggatggaagtgggttcatgaaccaaagggatactatgctaatttctgctcaggaccctgtccttacttgagatccgcagatacaactcattcaactgtgctaggactttacaacactctgaatcccgaagcctctgctagtccatgttgcgttccacaagacttggagccacttacaattttatattatgtaggacgtactccaaaggtcgaacagctgtctaatatggtggtcaaaagttgcaagtgttcg

SEQ ID NO: 20208 - DNA, 1236 bp, synthetic construct
  misc_feature 1..1236: note = source = /note="Description of Artificial Sequence: Synthetic coding sequence"
  source 1..1236: mol_type = other DNA
atgaaaatgcacctccaacgcgccttggtggtgctggctctgcttaatttcgcgaccgtatcactcagtctgagtacttgcacgaccctcgatttcggccacataaaaaaaaagcgggtggaggctatccggggccaaatactgagtaaattaagactgacttcacctcccgaacctacagtcatgactcatgttccctaccaggttctggcgttgtacaattcgaccagggaactccttgaggaaatgcacggcgaaagggaggagggctgcacacaggagaacacagagagtgagtattacgccaaggaaattcacaaatttgacatgatccagggtctcgctgaacataacgaacttgctgtgtgcccaaagggcattacatccaaggtgtttcggttcaacgtgagctccgtggagaagaaccgcaccaacttattcagagctgagttccgagtgctgcgagtacccaacccgagcagcaagagaaacgaacagcgcatcgaacttttccagatcctgaggcctgatgagcacatcgccaagcaaaggtacatcgggggcaaaaacctcccaaccagggggacagccgagtggctcagctttgatgtgacagatactgtgcgggaatggctgcttcgcagagagagtaatctgggcctggagatttccatccattgtccctgtcacactttccagccaaatggggacatactggagaacatccacgaagtaatggagattaagtttaagggggtggacaatgaagacgatcacggacgcggagacctaggccggctaaagaagcagaaagaccatcacaatccgcatctgatactaatgatgatccctcctcacaggctggacaaccccggacaaggaggtcaacggaagaagagggccctggatacaaactactgttttcgtaacttggaggaaaactgttgcgtacgaccattatacattgatttcaggcaggacctcggatggaaatgggttcacgagcctaaggggtattatgccaacttctgttctggtccatgcccctatcttcgaagcgctgataccacacatagcacggtgcttgggctatataacacattgaatccggaggcctccgcctccccttgttgtgtgccgcaggacctggaaccattgacgatcctgtactacgtaggacgaacccccaaagttgaacagttgtctaacatggtagtgaaatcatgcaagtgttct

SEQ ID NO: 20209 - DNA, 1236 bp, synthetic construct
  misc_feature 1..1236: note = source = /note="Description of Artificial Sequence: Synthetic coding sequence"
  source 1..1236: mol_type = other DNA
atgaagatgcaccttcaacgtgcactggttgtgcttgcattgctcaacttcgccaccgtgtcgcttagcctgtcaacctgtaccactcttgacttcggccacataaagaagaagcgagtcgaagcaatccgtggacaaatcctgtccaagctgaggctgacttcaccaccagaacccactgtgatgactcacgttccttaccaggtcctcgcactttacaactcgactcgtgaacttcttgaggaaatgcacggagagcgcgaggagggctgcactcaagaaaacactgaatctgagtattacgctaaagaaattcataagttcgacatgattcaaggtcttgctgagcataacgaacttgccgtgtgtcccaaaggcattacctcgaaggtttttagattcaacgtgtccagtgtcgaaaagaatcgaaccaacctgtttcgagccgaattcagagtccttcgggtgcccaaccctagctcgaagagaaacgaacagagaatcgaacttttccagatccttcgccccgatgaacacatcgccaagcaacggtatattggcggaaagaacctgccaacgcgcggtaccgccgagtggcttagcttcgatgtgaccgatactgtgcgcgagtggcttctgcggagagaaagcaacctgggtctggagattagcattcattgtccttgccatacctttcagcctaacggagatatcctggagaatattcacgaagtgatggagattaagtttaagggcgtggataatgaagatgatcacgggcgtggcgatcttggacgcctgaaaaagcaaaaggatcatcacaacccccatctcattctgatgatgattcctccacatagactggataaccctgggcagggagggcagaggaaaaaacgcgccctggacactaactattgttttcgcaatctcgaggaaaactgttgcgtcagacccctttacatcgattttcgccaagatttggggtggaagtgggtgcacgagccaaaaggttactacgcgaatttctgttcgggaccgtgtccatacctgcgatccgcggatactacccacagcactgtgctcggactgtacaatactcttaatccagaagcctccgcatccccttgctgcgtccctcaagatctcgaacctctcaccattctttactacgtggggagaactcctaaggtcgagcaactgtcaaatatggtggtgaaatcgtgcaagtgttcg

SEQ ID NO: 20210 - DNA, 1236 bp, synthetic construct
  misc_feature 1..1236: note = source = /note="Description of Artificial Sequence: Synthetic coding sequence"
  source 1..1236: mol_type = other DNA
atgaaaatgcacctgcagcgtgctctcgtagtgctcgcgcttcttaactttgcaaccgtgagcctttccttgtcgacttgtactactcttgatttcggacacatcaaaaagaagagagtggaggcaatcagaggacagatcctctccaagctgcgactcacttcgcctccagaacctaccgtgatgacccatgtgccttaccaagtgctggccctgtacaactcaacccgtgaacttctggaagaaatgcatggagagcgggaggaaggttgtacccaagagaatactgagtcggaatactacgccaaggaaatccataagtttgatatgatacagggactcgcagaacataacgagctggcagtctgtccaaagggaatcacgtccaaggtctttcgctttaacgtctcgtcggtcgaaaagaatcggactaacctgttccgggcagaattcagggtgcttagggtccccaacccttcctcgaagcgcaacgaacaacggattgagcttttccaaattctgaggcccgacgaacacattgccaagcaacgctacattggcggcaagaaccttccgacccgaggtaccgccgaatggctgtccttcgacgtgaccgacactgttcgggaatggctgctgagaagagaaagcaacctgggactcgaaataagcatccactgcccatgccatacctttcaacctaatggagacatcctggaaaacattcacgaagtgatggaaatcaaattcaaaggagtcgacaacgaagatgatcatggtcgcggagatctgggacggctgaaaaagcagaaagatcaccataacccccatcttattctgatgatgattccccctcatagactggataaccccggtcagggtggtcagcggaagaagcgggcactcgataccaattactgttttagaaacttggaagaaaactgctgcgtgcgcccactttacatagactttcggcaagaccttggatggaagtgggtccacgaaccgaaggggtattacgcgaatttctgctccggtccttgtccgtatctcaggtccgctgacactacgcattccactgtgctggggctctacaacaccctgaaccccgaagcctcagcaagcccgtgctgtgtcccccaggaccttgagccgcttactatcctgtactacgtgggacggactcctaaggtggagcaactgtctaatatggtggtgaagtcctgtaagtgttcg

SEQ ID NO: 20211 - DNA, 1236 bp, synthetic construct
  misc_feature 1..1236: note = source = /note="Description of Artificial Sequence: Synthetic coding sequence"
  source 1..1236: mol_type = other DNA
atgaagatgcacctgcagcgcgccctggtggtgctggctttactgaacttcgctactgtgtccctgagtctgtccacttgcactacgctcgactttggtcatattaaaaagaaacgggtcgaggcaattcgaggacaaattctgtcaaagctgcggctgacatctcctccagaacctactgttatgactcacgtgccttaccaggtgctggcgctgtacaatagcacacgggagctgctggaggagatgcatggtgaacgggaagagggctgcacacaggagaatactgaatccgaatactacgcaaaagagattcataaatttgatatgattcagggcctggctgagcacaacgaattagccgtttgtcctaaaggaatcaccagtaaagtttttcgcttcaatgtgagctccgtggagaaaaaccgtactaatctcttcagagcagagttcagggttctccgcgttccgaatccgtcttctaaacgcaacgagcagcggattgagctgttccagattcttcggcctgacgagcacatcgctaagcagaggtatatagggggaaaaaatctaccaaccagaggtaccgccgagtggctgtcattcgatgtgacagatactgtgcgcgaatggttgctccggagagaaagcaacctgggactggaaatcagtatccactgcccgtgtcacactttccaacccaatggagacatcttggagaacattcacgaagtcatggagatcaaattcaagggcgttgacaacgaggacgaccatggtagaggggatctgggccgcttaaagaagcagaaagatcatcataaccctcacctcattttaatgatgattccaccacacagactcgacaacccaggacaggggggccagcgcaaaaaaagggcactggatacgaactactgtttccggaacctggaagagaattgttgtgttagacccctgtatatagatttcagacaggatctgggatggaagtgggtacatgagcctaaaggctattatgccaatttctgcagtggaccatgtccgtacctgaggagcgctgatacaacccactccacggtacttgggctgtacaataccttgaacccagaggccagcgcttcaccttgctgcgttcctcaggacctggagcctctgacgatcctgtattatgtgggacggacacccaaggttgagcagctgtcaaatatggtagttaagagctgtaagtgctcg

SEQ ID NO: 20212 - DNA, 1236 bp, synthetic construct
  misc_feature 1..1236: note = source = /note="Description of Artificial Sequence: Synthetic coding sequence"
  source 1..1236: mol_type = other DNA
atgaagatgcacttacagcgagctctagttgtgctcgcactcctaaatttcgccacagtgtcgttaagtctgtctacttgcacaaccttggacttcgggcatattaaaaaaaagcgagtggaagcaatcagaggacaaatcttgtccaagttgagactgacctcgcctccagagccgacggttatgacccacgtcccatatcaagtactggctctgtataactctacgagggaactcctcgaagaaatgcatggggaacgagaggaaggatgcacacaggagaacacagagtcagaatattacgccaaggagatccacaaatttgacatgatccagggcctggccgagcataacgagcttgccgtatgcccgaaagggattactagtaaggtcttcaggtttaacgtttcctcagtggaaaagaatcggactaatcttttccgcgccgagttccgggttctgcgagtccctaatcccagtagtaaaaggaatgagcagcgaatagagctgtttcaaatcttaaggccagatgagcatattgccaagcagcgatatatcggaggaaaaaatctacctactcgcgggaccgctgagtggttgtcattcgatgttaccgacacggtccgcgagtggctcctgagaagagaaagcaacctcggtctcgagatttcaatccattgtccttgtcatacgttccaacccaatggcgacatactcgaaaacatccacgaggtgatggagattaaattcaagggggtggataatgaggacgaccatggcagaggagatcttggaagactgaagaagcagaaggatcatcataacccccatctcatcctcatgatgattccaccacacagattggacaatccaggccaaggaggacaaaggaagaaaagagcacttgatacaaattattgtttcagaaatctggaggaaaattgttgcgtaaggcctttgtacattgatttccgacaagatctgggctggaagtgggtccacgagcctaagggctactacgcaaacttctgcagtgggccttgtccttatcttagatccgctgatactactcacagtaccgttcttggtctctacaacactcttaaccctgaggcttcagcctcaccatgctgtgtgcctcaggacttggagccattgaccatactctattatgtcgggaggacccctaaggttgagcagctttccaacatggtagttaaatcatgtaagtgctct

SEQ ID NO: 20213 - DNA, 1236 bp, synthetic construct
  misc_feature 1..1236: note = source = /note="Description of Artificial Sequence: Synthetic coding sequence"
  source 1..1236: mol_type = other DNA
atgaaaatgcatttacaaagagcattagttgttttggcacttttaaattttgcaactgttagcttatcacttagtacatgtacaactcttgattttggtcatattaaaaaaaaaagagttgaagctattagaggacaaattctttctaaattaagattaacatcacctccagaaccaacagttatgactcatgttccttatcaagttttagcactttataattcaactagagaattattagaagaaatgcatggagaaagagaagaaggatgtactcaagaaaatacagaaagtgaatattatgctaaagaaattcacaagtttgatatgatacaaggattagctgaacataatgaacttgccgtatgcccaaaaggaattactagtaaagtatttagatttaatgtttcttccgttgaaaaaaatagaactaatttattcagagctgaatttcgagtattaagagttccaaacccatcatctaagagaaatgaacaaagaattgaactttttcaaattttaagacctgacgagcatattgcaaagcaaagatatattggagggaaaaatctaccaacacgaggaactgcagaatggctttcttttgatgttacagatactgtaagagaatggcttttaagaagagaaagtaatttaggattagaaatttctatacattgtccatgccatacatttcaaccaaatggagatattcttgaaaatattcatgaagttatggaaataaaatttaaaggtgttgataatgaagatgatcatggacgtggtgatttgggtagattaaaaaaacaaaaggaccatcataatcctcatttaatcttaatgatgattcctcctcatagacttgacaatccaggacaaggaggtcaaagaaaaaaaagagcattagatactaattattgtttcagaaatcttgaagaaaattgttgcgttagaccattatatatagactttagacaagatttaggatggaaatgggttcatgaaccaaagggatattatgctaatttctgttctggaccttgtccatatttacgtagtgctgatacgactcattctactgttcttggtttatataatactttaaacccagaagcaagtgcatcaccatgttgtgtcccacaagatttagaaccattaactattctttattatgtaggaagaactccaaaagttgaacaattatcaaatatggtagtaaaatcatgtaaatgtagt

SEQ ID NO: 20214 - DNA, 1236 bp, synthetic construct
  misc_feature 1..1236: note = source = /note="Description of Artificial Sequence: Synthetic coding sequence"
  source 1..1236: mol_type = other DNA
atgaagatgcatctccagcgggcactggtggtgcttgccctgctcaatttcgccactgtgtctctcagcctctccacctgcactacactggactttggccatattaaaaaaaaacgggtcgaagcgattagggggcaaattctgtctaagctgagacttacaagcccccctgagccgactgtcatgacacatgttccgtaccaggtactcgccctgtacaacagcacccgcgaactcttggaggagatgcacggtgagcgcgaggagggctgcacacaggaaaatacggaatccgagtattacgcgaaagaaattcacaaatttgatatgatccaaggcctggccgagcataacgagttagccgtatgccccaagggaattacctccaaggttttcaggtttaacgtgtccagcgtagaaaagaacagaactaatctgtttcgggcagagtttcgggtcttaagagtgccaaacccgtcttcaaaaagaaatgagcagcgaatagagttgttccagatactgcgacccgatgaacatatcgccaaacaaagatacatcggggggaaaaatttgcccacccgaggtactgccgagtggctgagcttcgacgtgacggacacagtgagggaatggctccttaggagagagtccaatctgggcctcgagatttctatacattgtccttgtcacaccttccagcctaatggcgatattcttgagaatatccatgaagtaatggagatcaaattcaagggcgttgataatgaagacgaccacgggagaggagatctgggacggctgaaaaaacaaaaggatcatcacaaccctcatctgattctaatgatgattccccctcataggctggataacccgggtcagggcggccagaggaagaaacgagccctcgatacaaattactgcttccgcaacctcgaagagaattgttgcgtgcggcccttatatattgacttcaggcaagacctcggctggaaatgggtccatgagccgaaaggctattacgcaaatttctgttccggcccatgcccgtacctgcgctccgccgatactacccactctaccgtgttagggctttataataccctcaatcctgaggcatctgcgtctccctgttgtgtaccccaagatctggagcccctgaccatcctgtactatgtgggtagaacgcctaaggtcgagcaactgagtaatatggttgtgaaaagctgtaagtgttcc

SEQ ID NO: 20215 - DNA, 1236 bp, synthetic construct
  misc_feature 1..1236: note = source = /note="Description of Artificial Sequence: Synthetic coding sequence"
  source 1..1236: mol_type = other DNA
atgaaaatgcatttgcagcgcgcactggttgtgctggccctgcttaattttgcgaccgtcagcctgtccctgtctacttgcactactcttgatttcggccacatcaagaaaaaacgagtcgaagctattcgggggcagattttgtcgaagttgcggctgaccagtccccctgagccgaccgtgatgacccatgtgccatatcaagtcttggcactgtacaactctactagggaattgctcgaagaaatgcatggagagagggaggagggctgcacccaggaaaacactgaaagtgaatattacgctaaagaaattcacaaattcgatatgattcaggggctggcggagcataatgaactagcagtgtgtcccaagggcatcacctctaaggttttccgctttaacgtatcctccgtggagaagaaccggaccaatctcttcagagcggagttcagggtgctaagagtgcctaatccaagcagcaaacgcaacgaacagcgtatcgaactgttccaaatacttcgaccagatgaacatatcgccaagcagcggtatatcgggggcaaaaatctgccgacccgcgggaccgcggagtggctctccttcgatgtgactgacactgttagggagtggctgctcaggcgtgaatctaacctcgggctcgagatcagtattcactgcccttgtcacacattccagcccaacggtgacatccttgagaatattcacgaagtcatggagatcaagttcaagggtgtggacaacgaggatgatcatggtcgcggcgatctcggtcgcctgaagaagcagaaggaccaccataacccccacctgatcctcatgatgattcctccacatcgcctagacaacccgggccagggaggccagagaaagaaaagggcactggatacaaactactgctttcggaaccttgaggagaattgttgtgtgcgtccattgtatatcgactttaggcaagacctaggctggaagtgggtccatgagcccaagggctactatgccaatttttgctccggtccatgcccttatctcaggtctgctgatactacccattccacagttctggggctctacaatacacttaacccagaggcgtccgcatccccttgctgcgtcccacaggatctggaaccactgacaatactgtactatgtgggccggactcccaaggtggagcagttgagcaacatggtggtgaaaagctgtaagtgctct

SEQ ID NO: 20216 - DNA, 1236 bp, synthetic construct
  misc_feature 1..1236: note = source = /note="Description of Artificial Sequence: Synthetic coding sequence"
  source 1..1236: mol_type = other DNA
atgaaaatgcatctgcaaagggctttggtggttcttgcgctgctcaatttcgccaccgtctccctttcactgtcgacatgcaccaccctcgatttcgggcatataaagaaaaagagggtggaggccatccgcggacaaattctgagcaaactccgactgacgtcaccacccgagccaacggtgatgacacacgttccctaccaggtgctggcactgtacaactcaacccgggaacttttggaagagatgcacggagaaagagaagaaggttgtacccaggagaatacagaaagcgaatattatgctaaagagatacacaaatttgacatgattcaggggctggccgagcacaatgaactagccgtgtgccccaagggtatcacctctaaggtgtttaggttcaatgtgtctagcgtcgagaaaaaccgaaccaacctcttccgtgcagagtttagagtcctccgggtgccaaaccccagctcaaagaggaacgagcaaaggattgagcttttccagatccttagaccagacgaacatatcgcaaaacagcggtatataggtggaaagaatctgccaacacgaggaactgcggaatggctctcatttgacgtgactgataccgtgagggagtggttgctgcggcgtgaatcaaacctggggctggagatttccatccattgcccttgtcacactttccagccaaatggggatatattagaaaacattcacgaggtgatggagatcaagtttaagggcgtggacaacgaggatgaccacggccgcggcgacttgggaagattgaaaaaacagaaagatcaccacaaccctcacttgatcctgatgatgattccccctcacaggcttgacaatcctggccaggggggacagagaaagaagagagctttagacaccaattattgtttccgcaatttagaggagaattgctgcgtcaggcccctttacattgatttcagacaggatctcggctggaaatgggtccacgaacccaagggctattatgcaaacttctgtagtgggccctgcccctacttaaggagcgcggacactacacattccaccgtgttaggactgtacaatactctgaaccccgaagcgagcgcctccccatgttgcgtcccccaagacttggagccactgaccattctgtactatgtgggtaggacaccaaaggtggagcagctgtccaatatggtagtcaaatcttgcaaatgctct

SEQ ID NO: 20217 - DNA, 1236 bp, synthetic construct
  misc_feature 1..1236: note = source = /note="Description of Artificial Sequence: Synthetic coding sequence"
  source 1..1236: mol_type = other DNA
atgaaaatgcatcttcagagagccctggtggtgctggcactgctgaacttcgctaccgtgtccctttccctttcaacctgtactaccctggatttcggacacattaagaagaagagagtggaagcaatccgtggacagattttgagcaagttgcggctcacgtcaccacctgagcctaccgtgatgacccacgtgccctaccaggtccttgccctctacaactcgactagggaactcttggaagaaatgcatggagaacgagaagaaggttgtacccaggagaataccgaaagcgaatactacgcaaaagaaatccataagtttgatatgatacagggcctcgcagaacataacgaactggcggtgtgcccgaaggggattacttcgaaggtctttagattcaatgtgtcgtcggtggagaagaacagaactaaccttttcagagcggaatttagagtgcttcgggtcccaaatcctagctccaagcgtaatgaacaacgcattgaactgttccaaattcttagaccggatgaacacattgcaaagcaacgttacattggagggaagaacctcccaacccggggaaccgcagagtggctttccttcgatgtgaccgataccgtgcgcgagtggctcctgagaagggaatccaatcttggacttgaaatttccatccattgtccgtgtcatacttttcaacctaatggtgacatactcgagaatattcacgaggtgatggagattaagtttaagggcgtggacaatgaagatgatcacggaagaggagatcttggccgacttaagaaacaaaaggaccaccacaatccccatctgattctgatgatgattcccccacatagactggacaacccgggacaaggaggtcaacgaaagaagcgggcacttgatactaactactgttttagaaaccttgaggaaaactgctgtgtgcggccactttacattgatttccggcaagacttgggttggaagtgggtgcacgaacctaaggggtactacgccaacttttgttccggaccttgtccctacctgcgttcagccgataccactcattccactgtgctgggactctacaacactctgaatcctgaagcatcggcctctccatgctgcgttcctcaggatctggagccccttactattctttactacgtgggaagaactccgaaggtcgaacagctttccaacatggtagtgaaatcgtgtaaatgttcg

SEQ ID NO: 20218 - DNA, 1236 bp, synthetic construct
  misc_feature 1..1236: note = source = /note="Description of Artificial Sequence: Synthetic coding sequence"
  source 1..1236: mol_type = other DNA
atgaaaatgcaccttcaacgcgcactggtggtgcttgcactcctgaactttgcaactgtctctctcagcctctcgacttgtactacccttgactttggccatatcaagaaaaagagggtggaagcaattcggggacaaattctcagcaagctgcgcctgacttcgcctccagagccgacggtcatgactcacgtcccgtaccaagtgctcgcactttacaactcgactcgggaactcctggaggagatgcacggagaaagagaagagggctgtacccaggagaacactgagtccgaatactacgcaaaagagattcacaagttcgatatgatccaaggactggcagagcataacgaactggcagtgtgtcctaaaggaataacctccaaggtctttaggtttaatgtgtcctccgtggagaagaatagaactaatctgtttagagcagaatttcgcgtgcttcgtgtgcctaacccctcatccaaacgcaatgaacagcggattgaactgtttcagattcttagaccggatgaacatattgctaagcagcggtacattgggggtaagaacttgcctaccagaggaacggcagaatggctgagcttcgatgtcaccgacaccgtgcgcgaatggctgctgcggagagagtcaaacttgggtctggaaatttcgattcattgcccctgccataccttccaaccgaacggagacattctggaaaacattcacgaggtgatggaaatcaagttcaagggggtggataatgaggacgaccatggaagaggagatcttggacgcctcaagaaacagaaggatcatcataatcctcaccttattctgatgatgatcccaccccatcggctggataatcctggccaaggcggacaacgcaaaaaacgtgcactggacaccaactactgttttcgtaacttggaggaaaattgttgtgtgcgaccactgtacatagactttcgccaagatctgggttggaaatgggtccatgaacctaagggatactacgcgaatttctgctccgggccttgtccctacctccgctcagcggacaccactcattcaactgtgttgggactgtacaacaccctgaaccctgaggcctccgcatcaccttgctgtgtccctcaggacctggaaccactcactatattgtactacgtcgggagaactcccaaagtggaacaactttccaatatggtcgtcaagtcctgtaagtgctcc

SEQ ID NO: 20219 - DNA, 1236 bp, synthetic construct
  misc_feature 1..1236: note = source = /note="Description of Artificial Sequence: Synthetic coding sequence"
  source 1..1236: mol_type = other DNA
atgaagatgcatctccaacgggctctggtggttttggccttgctgaattttgccacagtgagcttatcactaagcacttgtactacccttgatttcggacatatcaagaaaaagagagtcgaagcgataagaggtcaaatcctctccaagctaagactgacaagcccccccgaacctactgtaatgacccatgtaccctaccaagtcctagctttgtacaactccacaagggagctgcttgaagaaatgcacggtgaaagggaagagggatgtactcaggaaaacacagagagcgagtattatgccaaggagatacataagtttgatatgattcaaggcctggcagaacataacgaactcgccgtctgtcctaaagggatcacaagcaaagtcttccgttttaacgtgtctagcgtggagaagaacagaaccaatctgtttagggctgagtttagggtattgagggtgccaaacccctctagcaagagaaatgagcaaagaattgaattgtttcaaatcctgcgccctgacgagcatatcgccaaacagcggtacatcggaggaaagaacctgcccactcgagggaccgccgagtggctctcgttcgacgtgactgataccgtgcgcgaatggctattaaggagagaatctaatctcggtctggagatatctatacattgcccatgtcatacatttcagcccaatggagacatcctggaaaatatccatgaggtcatggagatcaagttcaaaggagttgacaacgaggatgaccacggcagaggagatctcggaagactcaaaaaacaaaaggaccatcataatcctcatctgattttgatgatgatcccaccccatagacttgataatccagggcaaggtggacagaggaagaagcgagctctcgataccaactattgctttaggaacctggaggaaaactgctgtgtccgaccactgtatattgattttagacaggacctcggctggaaatgggtacacgagccaaaaggctattacgccaacttctgcagcggcccttgtccttatctccgttccgctgataccactcacagcacagttctcggcctctataacacactgaaccccgaggcttcagcttcaccctgctgcgttccccaagacctcgagccattgactatcctgtattacgtgggcagaacccctaaggtggagcagttgagcaacatggtagtgaaaagctgcaaatgtagt

SEQ ID NO: 20220 - DNA, 441 bp, synthetic construct
  misc_feature 1..441: note = source = /note="Description of Artificial Sequence: Synthetic coding sequence"
  source 1..441: mol_type = other DNA
atggcctctcacaggctgttgctgttgtgcctggctggactggtgttcgtctcagaggccggacccactggcaccggcgaatcgaaatgtccgcttatggtcaaggtgctggacgctgtgcggggcagcccggcgatcaacgtcgcagtccatgtgttccgcaaggccgcagacgatacgtgggaaccatttgcctcgggcaaaacttccgagtcaggggagctgcacggactcactaccgaggaggaattcgtggagggaatctacaaagtggaaattgacaccaagtcctactggaaggccctgggaatttccccgttccatgagcacgccgaagtggtctttaccgccaacgactcgggcccacgccgctacactattgccgctttgctgtcgccatactcctacagcactatggccgtggtgactaacccgaaagag

SEQ ID NO: 20221 - DNA, 441 bp, synthetic construct
  misc_feature 1..441: note = source = /note="Description of Artificial Sequence: Synthetic coding sequence"
  source 1..441: mol_type = other DNA
atggcctcgcatcgattattgctgctctgtctggccggactggttttcgttagtgaggctggaccaacaggcacaggcgagtcaaagtgccccttaatggttaaggtactggacgctgttcggggctcaccagcaatcaatgtggctgtccacgttttccggaaggccgcggacgacacttgggagcccttcgcatccggaaagacaagcgaatcaggtgagctgcacgggctcacaaccgaagaggaatttgtggaggggatttacaaggtggagatcgataccaagtcctactggaaagctctcggcatctcgcccttccacgagcacgcggaggttgtatttaccgctaacgactccggcccccgtcggtatactatagctgctctgctgtctccatactcatactctactatggcagtcgtgactaaccccaaggaa

SEQ ID NO: 20222 - DNA, 441 bp, synthetic construct
  misc_feature 1..441: note = source = /note="Description of Artificial Sequence: Synthetic coding sequence"
  source 1..441: mol_type = other DNA
atggctagccacagactcctcctgctttgcctcgcaggactcgtctttgtctccgaggcgggcccaactggaactggagaatccaaatgccccctcatggtcaaggtgcttgatgcggtgagaggaagcccagcgatcaacgtggcggtgcacgtgtttaggaaggccgccgatgacacttgggagccgttcgcctccggaaaaacctcagaatcgggagagttgcacgggctgacgaccgaagaagagttcgtggagggaatctacaaagtggagatcgacactaagtcatattggaaggctctcggaatcagcccgttccatgaacatgccgaggtggtgttcaccgcgaacgattcaggtcctcgaaggtacaccatcgcagccctgctctcaccttactcctactcgactatggctgtggtcacgaatccgaaggaa

SEQ ID NO: 20223 - DNA, 441 bp, synthetic construct
  misc_feature 1..441: note = source = /note="Description of Artificial Sequence: Synthetic coding sequence"
  source 1..441: mol_type = other DNA
atggcatcccaccggcttttgctgctgtgtcttgcaggactggtcttcgttagcgaggctggccccaccggcacaggggagtctaagtgtcccctaatggttaaggttctggatgctgttcgcgggtctcccgccatcaacgtggccgtccatgtcttccgaaaggccgcggacgatacctgggagccctttgccagcggaaagacaagcgaatcaggagagctgcacggcctgacaactgaagaagaattcgtggagggaatttataaagtagaaattgataccaaaagttactggaaagccctcggaatctctccctttcacgaacacgccgaagtagtttttactgccaatgatagcggacctcgtcggtatacaattgctgcgttattaagcccatattcctattcaacaatggccgtggtgaccaatcctaaggag

SEQ ID NO: 20224 - DNA, 441 bp, synthetic construct
  misc_feature 1..441: note = source = /note="Description of Artificial Sequence: Synthetic coding sequence"
  source 1..441: mol_type = other DNA
atggcatcccaccggctcctcctcctgtgcctggctggactcgtgttcgtctcggaggcaggaccaacgggaactggagagagcaaatgtccactgatggttaaggtcctggatgcggtccgcggatcgcctgccatcaacgtcgccgtgcacgtgttcagaaaagcggcggacgacacttgggaaccgttcgcgtcaggcaagacctcggagtccggggagctgcatggcctgactacggaggaagagtttgtggagggtatttacaaggtcgaaattgatactaagtcgtactggaaggctctcggcatttccccgtttcatgaacatgcagaagtcgtgttcacggcgaatgactctgggcctcgccggtacacgatcgcggcactgctctcaccatattcatactctaccatggccgtggtgactaacccgaaggaa

SEQ ID NO: 20225 - DNA, 441 bp, synthetic construct
  misc_feature 1..441: note = source = /note="Description of Artificial Sequence: Synthetic coding sequence"
  source 1..441: mol_type = other DNA
atggctagtcacaggctgcttctgctttgccttgcgggcctggtcttcgtgtcagaggctggacctacaggcaccggcgagagcaagtgccctctgatggttaaggtactggatgcagtcagggggagccctgcgataaatgtcgctgtgcacgtgtttagaaaggcagctgacgatacctgggaaccttttgccagcggaaagacgagcgaatcaggagagctgcatgggctcaccacagaggaggagtttgtcgaaggaatctacaaggttgagatcgacacaaaaagctattggaaagcgctgggcataagcccctttcacgagcatgccgaggtggtgttcacggccaacgatagcggtcctagacgctacacaatcgccgccctgctcagcccctacagttacagtaccatggctgtcgtgacaaaccccaaagag

SEQ ID NO: 20226 - DNA, 441 bp, synthetic construct
  misc_feature 1..441: note = source = /note="Description of Artificial Sequence: Synthetic coding sequence"
  source 1..441: mol_type = other DNA
atggctagccataggctgctcctcttgtgcctcgcaggtctggttttcgtgtctgaggcaggccctactggaacaggtgagtctaagtgtccactcatggttaaggtcttggatgccgtgcgcggtagtcccgcaatcaacgttgccgtgcacgtctttaggaaagccgctgatgatacttgggaaccattcgcctcaggcaagacttctgagagcggagagctgcacggtctgacgactgaggaagaatttgtagaaggtatttataaggtggaaatagacacaaaatcatactggaaggctttgggaatatctccattccacgagcatgctgaagtcgtgttcaccgccaatgacagcggaccgcgccgctacactattgccgccctgctttcaccatattcttacagcactatggccgtggttaccaacccgaaggag

SEQ ID NO: 20227 - DNA, 441 bp, synthetic construct
  misc_feature 1..441: note = source = /note="Description of Artificial Sequence: Synthetic coding sequence"
  source 1..441: mol_type = other DNA
atggcatctcaccgattgctgctgctgtgcctggcaggactggtcttcgtctccgaggcgggccctaccgggactggggagagcaaatgcccgcttatggtcaaagtacttgatgcagtgagggggagccctgccatcaatgtggccgtgcatgtgttcagaaaggccgcagatgatacctgggagccgttcgcttcaggtaagacatcagaatctggtgagctacacggcctcactactgaggaggagtttgtagaaggtatctacaaagttgagatcgacacaaagagttactggaaagcattggggatctctccctttcacgaacacgccgaggtggtgtttaccgcaaatgatagtggaccccggcggtacacaatcgctgcgctgttgagcccatattcctactcaacaatggccgtggtgaccaaccccaaggag

SEQ ID NO: 20228 - DNA, 441 bp, synthetic construct
  misc_feature 1..441: note = source = /note="Description of Artificial Sequence: Synthetic coding sequence"
  source 1..441: mol_type = other DNA
atggcgtcccaccggctgttgctcctttgtttggccggcctggtgttcgtgagtgaggccgggcctactgggaccggcgagagcaagtgcccgctgatggtgaaagttcttgatgctgtgcgaggcagcccggctattaacgtggccgtgcacgtgttcagaaaggccgccgatgacacctgggaacctttcgctagtggaaaaacttctgagtccggagagcttcatgggctgacaaccgaggaggaattcgtggaaggcatctataaagtggagatagatacaaagtcctactggaaggcgctgggaatctcaccctttcatgaacacgctgaggtggtattcaccgccaacgatagcggtccgaggcggtacacaatcgcagcgctcttgagtccttacagttacagcaccatggccgtagtcactaatcctaaggaa

SEQ ID NO: 20229 - DNA, 441 bp, synthetic construct
  misc_feature 1..441: note = source = /note="Description of Artificial Sequence: Synthetic coding sequence"
  source 1..441: mol_type = other DNA
atggcgagccatcggcttcttctgctctgcctcgctggccttgtgtttgttagcgaggctgggccaaccgggacaggggagtcgaaatgtcccctcatggtcaaggtgctggacgccgtaaggggatcgccggccattaacgtagccgtgcacgtatttcgaaaagctgccgatgacacctgggaaccattcgcatccggtaagacaagtgaatctggcgaattgcatggattgaccaccgaagaagagtttgttgaaggaatttataaagttgagatcgacacaaagtcctactggaaagctctaggaatctcaccttttcacgagcacgctgaggtcgtgttcaccgccaacgacagtggaccccggagatatactatcgcagcgctgttgtccccgtacagttattccaccatggcagttgtgactaaccctaaagaa

SEQ ID NO: 20230 - DNA, 441 bp, synthetic construct
  misc_feature 1..441: note = source = /note="Description of Artificial Sequence: Synthetic coding sequence"
  source 1..441: mol_type = other DNA
atggccagtcatagactgttacttttatgtctggctgggctcgtgttcgtgagtgaggctgggcccacaggtactggagagagcaagtgtcccctgatggtaaaggtgctggatgcagtgaggggcagcccggccatcaacgtggcagtgcacgtgttccgcaaagccgcggatgacacctgggagccatttgcttctggcaagacctccgaatccggggaactgcacggcctgaccacagaggaggagtttgtggaaggaatttataaagtggagatcgacaccaaaagttactggaaggccctaggaatcagccccttccatgagcatgccgaggtagtttttaccgcgaatgatagtggcccacggaggtacaccattgccgctctgttgagcccttatagctacagcaccatggccgtggtgacgaaccccaaggaa

SEQ ID NO: 20231 - DNA, 441 bp, synthetic construct
  misc_feature 1..441: note = source = /note="Description of Artificial Sequence: Synthetic coding sequence"
  source 1..441: mol_type = other DNA
atggcttcgcaccggctcctgctgctgtgcctcgctgggctggtctttgtgtcggaagccggaccaactggaactggggagtcgaagtgtcccctgatggtgaaggtcctggacgccgtgcggggtagcccggccatcaacgtcgccgtccacgtgttcaggaaggccgccgatgacacctgggagccattcgcctcaggaaagacgtctgagtccggggagttgcacggtcttaccaccgaagaggagtttgtggaaggaatctacaaagtggagatcgatactaagtcatattggaaggctctcggtatctccccgtttcacgagcacgcagaagtggtgttcaccgcaaacgacagcggacctcggaggtacaccattgcagcgcttttgtccccgtactcgtactcgaccatggccgttgtgactaacccaaaggag

SEQ ID NO: 20232 - DNA, 441 bp, synthetic construct
  misc_feature 1..441: note = source = /note="Description of Artificial Sequence: Synthetic coding sequence"
  source 1..441: mol_type = other DNA
atggcatcgcatagacttctgttgctgtgcctggccggacttgtgttcgtgtcggaggccggtccaactggcaccggagagtcgaagtgcccgcttatggtcaaggtgctggacgcggtgagaggttcgcctgccatcaatgttgccgtgcatgtgttccgcaaggcggcggacgatacctgggaaccgttcgcaagcggaaaaacgtccgaatccggtgagttgcatgggcttaccacggaagaagaattcgtggaaggcatttacaaggtggaaattgatactaagtcctactggaaggctttggggatctcaccattccacgagcacgctgaggtcgtgtttaccgcgaacgatagcggaccgcggcggtataccatcgccgcattgctctccccttactcctactcgactatggcggtggtgactaacccaaaggaa

SEQ ID NO: 20233 - DNA, 441 bp, synthetic construct
  misc_feature 1..441: note = source = /note="Description of Artificial Sequence: Synthetic coding sequence"
  source 1..441: mol_type = other DNA
atggcatcccaccgcctgctccttctctgtctggcgggtttggtgttcgtgtcggaggctggaccgactggtactggtgaatcgaagtgcccgctgatggtgaaggtgctcgatgcggtccggggctcccccgcgatcaacgtggcggttcatgtctttcggaaagctgcagatgacacgtgggaaccattcgcatcgggcaagacgtcagagtccggagagctgcacggcctgactactgaggaggaatttgtcgaaggaatttacaaggtggagattgataccaaaagctactggaaggcattggggatatcgcctttccatgaacatgcagaagtggtgtttaccgcaaacgattcggggccaagacgttacactattgcagccttgctttccccttacagctatagcacgatggcagtggtgaccaatcctaaggag

SEQ ID NO: 20234 - DNA, 441 bp, synthetic construct
  misc_feature 1..441: note = source = /note="Description of Artificial Sequence: Synthetic coding sequence"
  source 1..441: mol_type = other DNA
atggcatcccaccggcttctcttactgtgccttgccggcttggtgtttgttagtgaggcagggcccactgggacaggggaatcgaagtgcccattaatggtcaaagtattggatgcggtgagagggagtccagctatcaacgtggcagtccacgttttccgcaaggcggccgatgatacgtgggagccgtttgccagcgggaagacgtccgagtctggggagctccatggcctgacaacggaggaagaattcgtcgaaggaatctacaaagtcgaaattgataccaaatcctattggaaagccctggggatctcacccttccacgagcacgctgaggtggtgttcacggccaacgatagcggaccccgtcgctacaccattgccgctctgttatccccctacagctattccactatggcagtggttaccaaccctaaggag

SEQ ID NO: 20235 - DNA, 441 bp, synthetic construct
  misc_feature 1..441: note = source = /note="Description of Artificial Sequence: Synthetic coding sequence"
  source 1..441: mol_type = other DNA
atggcctcacaccggctgctccttctctgtttggcaggactggttttcgtctcagaggcggggcctaccggaacgggtgaaagcaaatgcccacttatggtgaaggtgctggatgcagtccgcggatcaccggctatcaatgtggcagtgcatgtgttcaggaaagcggctgacgacacttgggaaccatttgcgagcggcaagacgtcggagtctggagagctgcacggactgaccacggaagaagagtttgtggagggtatctacaaggtcgaaattgataccaaaagctactggaaggcactgggaatcagcccttttcatgaacacgcggaggtggtgttcaccgccaacgacagcggtccgagacgctacactatcgcggccctcctgtcgccgtactcctattcgactatggcagtggtgaccaacccaaaggag

SEQ ID NO: 20236 - DNA, 441 bp, synthetic construct
  misc_feature 1..441: note = source = /note="Description of Artificial Sequence: Synthetic coding sequence"
  source 1..441: mol_type = other DNA
atggcgtcacatcggctccttctgctgtgtctggcaggactggtgttcgtgtccgaggctggcccaactgggaccggtgagtcgaagtgcccgttgatggttaaagtgctcgacgctgtgaggggatctcctgccatcaatgtggcggtccacgtctttagaaaggccgcagacgatacctgggaacctttcgccagcggcaagacttccgaatcgggagagctgcatggactcaccaccgaagaagaattcgtggagggaatctacaaggtcgagatcgacactaaatcctactggaaggcactcgggatctcgccgttccacgaacacgccgaggtggtctttaccgccaacgatagcggcccacgccgctacactattgccgctctgctgagcccctactcgtattcaactatggcggtggtgacgaacccgaaggaa

SEQ ID NO: 20237 - DNA, 441 bp, synthetic construct
  misc_feature 1..441: note = source = /note="Description of Artificial Sequence: Synthetic coding sequence"
  source 1..441: mol_type = other DNA
atggctagccaccgtctgctgctgctgtgcctggctggtcttgtgttcgtgtcagaggctgggcccaccggaaccggcgagagcaagtgccccctaatggtcaaggtgctagatgctgtcagaggttcacccgcgattaatgtcgccgtgcatgttttccgcaaagccgctgatgacacatgggagccgttcgcaagtgggaagaccagcgagtctggggaactccatggcttgacgaccgaggaagaattcgtagagggaatatataaagtggagattgatacaaaaagctactggaaagcgctcgggattagtccatttcacgagcacgcggaggtcgtgttcacagccaacgactcagggcctcgacggtatactatcgccgccctcctgtctccttacagctatagtacgatggcagtcgtaacaaaccccaaagag

SEQ ID NO: 20238 - DNA, 441 bp, synthetic construct
  misc_feature 1..441: note = source = /note="Description of Artificial Sequence: Synthetic coding sequence"
  source 1..441: mol_type = other DNA
atggcaagtcaccggctattgctcttgtgcctggctggtttggtatttgtatctgaagcgggcccaaccgggactggcgagagtaagtgccccttaatggtaaaagtcttggacgccgttagagggtctccagccattaacgtggcggttcacgtgttccgcaaggctgctgatgatacgtgggaacctttcgcgtccgggaagacctctgagagcggcgagctgcacggccttacaaccgaggaggagttcgtagagggaatttataaagtggagatagatactaaatcctactggaaggcattgggcatctctccctttcacgagcacgccgaggtggtatttacggcgaacgatagcggaccccggagatatactatcgccgccctactgtccccctactcttatagtactatggctgtggtgaccaaccccaaagag

SEQ ID NO: 20239 - DNA, 441 bp, synthetic construct
  misc_feature 1..441: note = source = /note="Description of Artificial Sequence: Synthetic coding sequence"
  source 1..441: mol_type = other DNA
atggcatcacaccgtctgcttctgctctgcctggcgggcctggtgttcgtgagcgaagcgggaccaaccggtaccggagagtccaagtgtccactcatggtaaaagttcttgatgcagtgcggggctctccagccattaatgtggcggtgcacgtttttagaaaggcagcagacgacacttgggaaccttttgcgtcgggtaagacgtcggagagcggtgaactgcatggtctgacgactgaagaagaatttgtggagggaatatacaaggtggaaatcgataccaaatcatactggaaggccttgggaatctccccttttcatgaacatgcagaggtggtctttactgccaacgactcaggccctcgcagatataccatcgcagctctgttgtctccttactcctactcaaccatggccgtggtgaccaacccgaaagaa

SEQ ID NO: 20240 - DNA, 441 bp, synthetic construct
  misc_feature 1..441: note = source = /note="Description of Artificial Sequence: Synthetic coding sequence"
  source 1..441: mol_type = other DNA
atggccagccaccgtctgttgttactgtgtctagccggacttgtctttgtgtcagaggccgggcccacaggtaccggggaatcgaagtgtcccctaatggtcaaagtgctagatgctgtccgaggatcacccgctattaatgttgctgttcatgtcttccgtaaagcagcagacgacacctgggagcccttcgcctcaggcaaaacaagcgagagtggagagctgcacggtctgacaacggaggaggagttcgtcgaaggcatttataaggtcgagatcgacaccaagtcctattggaaagcactgggaattagcccatttcacgagcacgctgaagtggtgtttaccgctaatgactcagggcccagacgctacaccatcgctgcacttttaagtccttactcgtactcgacaatggccgtggtgacgaatccgaaggag

SEQ ID NO: 20241 - DNA, 441 bp, synthetic construct
  misc_feature 1..441: note = source = /note="Description of Artificial Sequence: Synthetic coding sequence"
  source 1..441: mol_type = other DNA
atggcgagccaccgactgttactcctgtgtctcgccggattggtgttcgtgtccgaagctggccctacgggaacaggtgagtccaagtgccctttgatggtaaaggtactggacgctgtgcggggatctccggctatcaacgtggctgtgcatgtatttcgcaaggcagcagatgacacatgggagcccttcgcctccggcaagacgtcagaaagcggtgagttgcacggcctgaccaccgaagaggaatttgtagaggggatctataaagtcgagatcgatacaaagagttactggaaggcacttgggatcagtccattccatgagcacgctgaggtagttttcaccgccaacgatagcgggccaagacgctataccatagcggcattactgtcaccgtacagctatagcactatggccgtggtgaccaatcctaaagag

SEQ ID NO: 20242 - DNA, 441 bp, synthetic construct
  misc_feature 1..441: note = source = /note="Description of Artificial Sequence: Synthetic coding sequence"
  source 1..441: mol_type = other DNA
atggctagtcatagactgctcctcttgtgccttgcaggcctggtgttcgtgagcgaggcaggtccaactggaactggtgagtctaaatgtcctctgatggttaaagtcttggatgccgtgaggggcagtcccgcaataaatgtcgcagtccacgtatttagaaaagccgccgatgacacctgggagccattcgcttctggtaagacatcagagtctggcgagctgcacggacttactaccgaggaggaatttgtggagggcatttataaggtggaaattgataccaaatcctactggaaggctttgggaatctcacctttccatgaacacgccgaagtcgtgttcactgcaaacgattctggcccccgcaggtacaccatcgctgcccttctgtccccctatagctattctacaatggcagtagttactaatccaaaggag

SEQ ID NO: 20243 - DNA, 441 bp, synthetic construct
  misc_feature 1..441: note = source = /note="Description of Artificial Sequence: Synthetic coding sequence"
  source 1..441: mol_type = other DNA
atggcctcacataggctgttgctgctctgtcttgccggcctggtgtttgtctccgaagccggaccaactggaaccggagagtcgaagtgcccgctgatggttaaagtgctcgatgcagtccgcggaagccccgccataaatgtcgcggtgcatgtgttccgcaaggcggccgatgacacctgggagccttttgcatcgggtaagaccagcgagtccggcgaactgcatggactgacgaccgaagaagagttcgtggagggaatctacaaggtcgagattgacactaagagctactggaaagcattgggcatctcacccttccatgaacatgccgaggtcgttttcactgccaacgacagcggtccgagacgctacactatcgcagccctcctttcgccatactcctattcgactatggccgtcgtgacgaacccaaaggag

SEQ ID NO: 20244 - DNA, 441 bp, synthetic construct
  misc_feature 1..441: note = source = /note="Description of Artificial Sequence: Synthetic coding sequence"
  source 1..441: mol_type = other DNA
atggcttctcaccggctgttgttattgtgtctcgctgggctggtgttcgtgtctgaagctggacccactggcacaggcgagagcaagtgccccctgatggtgaaagtgttggatgctgtccgcggttcacctgccatcaacgtggctgtccacgtgtttcgcaaagccgcagacgacacctgggagccattcgcatcagggaaaaccagcgaaagcggcgagttacacgggctgaccaccgaagaggagttcgtcgaaggtatatacaaggtggagatagacaccaagtcttactggaaggccctggggatttctccatttcacgaacacgcagaagtggtttttaccgccaatgactctggtcccaggcggtatactattgctgctctactatccccttatagttattctacaatggccgtcgtcacaaacccaaaagaa

SEQ ID NO: 20245 - DNA, 441 bp, synthetic construct
  misc_feature 1..441: note = source = /note="Description of Artificial Sequence: Synthetic coding sequence"
  source 1..441: mol_type = other DNA
atggcctcccatcggcttcttctgttgtgccttgcaggattggtctttgtctcagaagcgggtccgacgggcaccggggaatcgaagtgtcctctgatggttaaggtgctggacgcagtgcgcggttcgcccgccataaacgtggcagttcacgtgtttagaaaagcagcagatgatacttgggaaccatttgcatccggtaaaacctcggagtccggcgagctccacggattgaccactgaagaagagtttgtggaaggaatttacaaggtggagatcgacactaagtcatactggaaagcgctcggtatcagccccttccatgaacatgctgaggtagtattcaccgcaaatgattccggccctaggagatacacgattgctgctctccttagcccatacagttattcgaccatggctgtggtcactaaccctaaggag

SEQ ID NO: 20246 - DNA, 441 bp, synthetic construct; identical to SEQ ID NO: 20240
  misc_feature 1..441: note = source = /note="Description of Artificial Sequence: Synthetic coding sequence"
  source 1..441: mol_type = other DNA

SEQ ID NO: 20247 - DNA, 441 bp, synthetic construct
  misc_feature 1..441: note = source = /note="Description of Artificial Sequence: Synthetic coding sequence"
  source 1..441: mol_type = other DNA
atggcttcacacagacttctactgttgtgtctcgcaggcctggtgttcgtgtcagaagcagggccaacaggcaccggcgagtccaagtgccctctgatggtgaaagtgctcgatgccgtgcggggatccccagctatcaacgtggccgtgcacgtatttcgtaaagctgctgatgatacctgggagcccttcgctagtgggaagacctcagagtccggtgaacttcacgggcttacgacggaggaggagttcgtcgagggaatctacaaggtcgaaattgatactaaatcctattggaaggcactcggcatttccccctttcatgagcacgcagaagtggttttcactgccaacgacagcgggcctaggaggtatactatcgcggcactcctgtctccatatagctactccaccatggcagtggtcactaaccctaaggaa

SEQ ID NO: 20248 - DNA, 441 bp, synthetic construct
  misc_feature 1..441: note = source = /note="Description of Artificial Sequence: Synthetic coding sequence"
  source 1..441: mol_type = other DNA
atggcatcccacagattgttgttgctgtgtctggcaggtctggtgtttgtgagcgaagccggccccacgggcactggcgagtccaaatgcccacttatggttaaggtgctggatgcggttagggggagccctgctatcaatgtagcggtacatgttttccggaaggcagccgacgacacctgggaaccattcgcatcagggaaaacttccgaatcaggagagctgcatggactgaccactgaagaagaatttgtcgaaggaatttacaaggtggagattgatacaaagtcatattggaaagcattgggcattagtcctttccatgaacatgcggaagtggtgttcacagcaaatgattccggaccgcggcgatatactattgctgcacttttgagtccttatagttactcaaccatggccgttgttactaatccgaaggag

SEQ ID NO: 20249 - DNA, 441 bp, synthetic construct
  misc_feature 1..441: note = source = /note="Description of Artificial Sequence: Synthetic coding sequence"
  source 1..441: mol_type = other DNA
atggcgtcccaccgccttctgcttctgtgtctggcaggcttggtgttcgtgtcagaagctggaccgaccggaactggagaatctaagtgcccgctcatggtcaaggtgctggatgccgtgcgggggtcgcctgcgattaacgttgccgtgcacgtttttcgcaaggctgcggatgacacttgggagccattcgcctcaggcaagacgtctgagtccggtgagctgcatggcctcaccactgaggaagagttcgtggaaggtatctacaaagtcgaaatcgacaccaagtcatactggaaagccctcgggatctcaccgttccacgagcacgcggaagtggtctttactgcgaatgactccggaccgcggcggtatactattgccgcactgctgtccccctactcctactcgactatggccgtcgtgaccaatccaaaggaa

SEQ ID NO: 20250 - DNA, 441 bp, synthetic construct
  misc_feature 1..441: note = source = /note="Description of Artificial Sequence: Synthetic coding sequence"
  source 1..441: mol_type = other DNA
atggcatcacataggctgttgctcttatgcctcgcaggacttgtttttgttagcgaagcagggcctaccggaacgggagaaagtaaatgtccgcttatggtcaaagtgcttgacgcggtaagaggcagcccggcgattaatgtagccgttcatgtctttcgtaaggccgctgacgacacgtgggaaccgtttgcctcaggaaaaacatccgaaagcggtgagctgcatggattaaccacagaagaggaatttgtcgaaggtatttataaagttgaaatcgataccaagtcgtactggaaagctttgggtatttcaccgttccatgaacatgcggaagttgttttcaccgctaatgattcaggaccgagacgctatacaatcgcagctcttctgtcaccgtatagctattccacgatggctgttgtcaccaatcccaaagaa

SEQ ID NO: 20251 - DNA, 441 bp, synthetic construct
  misc_feature 1..441: note = source = /note="Description of Artificial Sequence: Synthetic coding sequence"
  source 1..441: mol_type = other DNA
atggcgtcccaccgcctgctgctgctgtgtctggcgggtctagtctttgtttcagaggcggggccaaccgggaccggcgaaagtaagtgcccactgatggtcaaagtactggatgcggtgcgaggtagcccagcgatcaatgtggccgtgcatgtatttcgcaaggcagccgacgatacttgggagcctttcgcgtcaggaaaaacgagcgaatctggggaactgcacggcctaacgacggaagaggagttcgtcgaaggtatttataaagtggagatcgacaccaagagctattggaaggccctgggtattagcccatttcacgagcacgcggaggtggttttcaccgccaacgacagcggccccagacgctacacgatcgccgcgttactgagcccgtattcctacagcaccatggcagtcgttaccaacccaaaggag

SEQ ID NO: 20252 - DNA, 441 bp, synthetic construct
  misc_feature 1..441: note = source = /note="Description of Artificial Sequence: Synthetic coding sequence"
  source 1..441: mol_type = other DNA
atggcatcccaccggcttttgctgctgtgcctggccgggctggtgttcgtgtcggaggctggtccaactggaaccggagaaagcaagtgcccgctgatggtgaaggtccttgatgcagtgcgcggtagccctgccatcaacgtggctgtgcatgtctttcgcaaggccgcagacgatacctgggaaccctttgcttcgggaaagaccagcgaatcaggggagctgcatggtctgacgactgaagaagagttcgtggagggcatttacaaggtggaaatcgatactaaatcatactggaaggcgctcggaatctccccgttccatgaacacgctgaagtggtctttactgccaacgactccggtccgcggcggtacactatcgccgccctcctctccccctattcctactccacgatggcggtggtcactaaccccaaggag

SEQ ID NO: 20253 - DNA, 441 bp, synthetic construct
  misc_feature 1..441: note = source = /note="Description of Artificial Sequence: Synthetic coding sequence"
  source 1..441: mol_type = other DNA
atggcaagtcaccgcctcctcctgctttgtctggccggcctggtattcgtgagcgaagccggaccgactgggactggagaaagcaaatgcccgctcatggttaaagtgctggacgcggtgcgcggttccccagccatcaatgtcgccgtacacgtgttcagaaaggcagctgatgacacttgggagccttttgcttcaggaaaaacttccgagtcaggcgagctgcatggactgacgactgaagaagaatttgtggaaggaatctacaaggtcgaaatcgataccaagtcgtattggaaggcccttgggatttccccgttccatgagcacgccgaggtcgttttcaccgcgaacgactcgggtcctagacgttacaccatcgcggcgcttcttagcccatactcgtactcgaccatggctgtggtgaccaaccccaaagaa

SEQ ID NO: 20254 - DNA, 441 bp, synthetic construct
  misc_feature 1..441: note = source = /note="Description of Artificial Sequence: Synthetic coding sequence"
  source 1..441: mol_type = other DNA
atggccagccatagacttctgttgctgtgtcttgctggactggtgtttgtctcagaagcaggtcctactggtacgggagaaagcaaatgccctcttatggtgaaggtgctcgacgcagttaggggtagccctgccattaatgtggccgtgcacgtgtttagaaaagccgcggacgatacctgggaaccttttgcgtcgggaaagacctcggagtccggtgaattgcatgggctgactaccgaagaagagttcgtggaaggaatttacaaggtcgagatagatacgaagtcctactggaaggcactgggtatctcgcctttccatgaacacgctgaggtggtctttaccgctaacgattcagggcccagacgctacaccatcgcagcactgctgagtccctattcgtactcgactatggctgtggttactaaccctaaagag

SEQ ID NO: 20255 - DNA, 441 bp, synthetic construct
  misc_feature 1..441: note = source = /note="Description of Artificial Sequence: Synthetic coding sequence"
  source 1..441: mol_type = other DNA
atggcctcccaccggttgctgctgctgtgtctcgccggtttggtgtttgtgtccgaagccgggccgacgggaactggagaatctaagtgcccgctgatggtgaaggtcctcgacgcagtccggggaagccccgcaatcaacgtggcggtccatgtgttccgcaaggcagccgacgacacctgggaaccgttcgcgtcaggtaagacgtcagagtcgggagagctgcatggactgactaccgaagaggaattcgtggaggggatttacaaggtggaaatcgatactaaatcctactggaaagccctcggaatctcaccattccatgaacacgctgaggtcgtctttaccgccaacgactccggtccgaggcgctacactatcgctgccctgctgtccccctactcctactcaacgatggccgtggtgactaacccgaaagaa

SEQ ID NO: 20256 - DNA, 441 bp, synthetic construct
  misc_feature 1..441: note = source = /note="Description of Artificial Sequence: Synthetic coding sequence"
  source 1..441: mol_type = other DNA
atggcaagccaccgtttgctgctgctgtgtctggccggcctggttttcgtgagcgaggctgggcccaccggaacaggcgagtcgaaatgtcccctcatggtgaaagttctggacgccgtgcggggtagcccagcaatcaacgttgccgttcacgtttttcgaaaagcagccgacgatacatgggagccgttcgcaagtgggaagaccagtgaatcaggagagctccatgggctaaccaccgaagaagagtttgtggaaggaatctacaaggtagaaatcgatactaaaagttattggaaggccctgggtatatctccgtttcatgaacatgccgaggtagtgtttaccgccaatgactctggcccaagacgatacacaattgccgcactgcttagcccttactcttactccactatggctgtggttactaaccctaaggaa

SEQ ID NO: 20257 - DNA, 441 bp, synthetic construct
  misc_feature 1..441: note = source = /note="Description of Artificial Sequence: Synthetic coding sequence"
  source 1..441: mol_type = other DNA
atggcttcccacaggctgcttctcctctgtttggcgggcctagttttcgtttccgaagctgggcctacgggcacaggggagtcgaaatgccccctcatggtgaaggtgctagatgctgtccgaggcagtccggcaatcaacgtcgccgtccacgtgtttcgtaaagccgccgacgacacatgggaaccttttgcctctgggaaaacttccgaaagtggagagctgcatggcctgaccacagaagaggaattcgtggaggggatctataaagttgaaatagacacaaagagctattggaaagctcttgggatatcaccgttccacgagcacgcagaggtggttttcacagccaacgatagcggccctagacgctacactatagccgctcttctctctccatattcttattccaccatggctgtagttaccaacccaaaagag

SEQ ID NO: 20258 - DNA, 441 bp, synthetic construct
  misc_feature 1..441: note = source = /note="Description of Artificial Sequence: Synthetic coding sequence"
  source 1..441: mol_type = other DNA
atggcctcccaccgtctgctcctgctgtgcctggccggtctggttttcgtgtcggaagcgggcccgacgggcacgggcgagtccaagtgcccactcatggtgaaagtgttggatgccgtgaggggatcgcctgcaattaatgtcgccgtgcacgtttttaggaaggcagctgacgatacctgggaaccattcgcttcaggaaagaccagtgagagcggtgagctgcacggcctcactacagaggaagagttcgttgagggaatctataaggtcgagatcgataccaagagttactggaaggcgcttggcatatctccattccatgagcacgccgaggtggtcttcacggctaatgatagcggcccacgtcgctataccatagccgcactactctccccgtacagttactcgaccatggcagtggtgacgaaccctaaagag

SEQ ID NO: 20259 - DNA, 441 bp, synthetic construct
  misc_feature 1..441: note = source = /note="Description of Artificial Sequence: Synthetic coding sequence"
  source 1..441: mol_type = other DNA
atggcgtcacaccggctcctcctgctgtgtctggctggactcgtgttcgtgtccgaggccggcccgaccggaactggagaatccaagtgcccactgatggtgaaagtcctcgacgccgtgcgggggtcgccggccatcaatgtcgccgtgcatgtgttccgcaaggccgcagacgacacgtgggaaccattcgcctcaggtaagacctcggaatcaggagaactgcacggactcactactgaggaagagttcgttgagggaatctacaaggttgaaatcgacaccaaatcgtactggaaggctcttggtatcagcccgttccacgaacatgccgaggtggtgtttaccgcgaacgatagcggtccgcgcaggtacactatcgcagccctgctgtccccgtactcgtatagcaccatggctgtggtgaccaatccaaaggag

SEQ ID NO: 20260 - DNA, 441 bp, synthetic construct
  misc_feature 1..441: note = source = /note="Description of Artificial Sequence: Synthetic coding sequence"
  source 1..441: mol_type = other DNA
atggcctctcacagactactgctgctttgtctggcgggtctggtttttgtgagtgaggcaggtcccactggtaccggggagagtaaatgccccctgatggtgaaagtgcttgacgccgtcagggggagccctgcgataaacgtagccgtacatgtgtttcgaaaggccgccgacgatacgtgggagccattcgcaagcgggaagacaagcgagtctggtgaactgcatggcctgaccactgaggaagaattcgtcgaagggatctacaaagtggagattgacactaagtcctactggaaggcactgggaatttcccccttccatgagcacgcagaggtggtttttacggctaacgactctggacccaggagatacacgatcgccgccctgctcagcccatacagctactccacgatggccgttgtcacaaaccccaaagag

SEQ ID NO: 20261 - DNA, 441 bp, synthetic construct
  misc_feature 1..441: note = source = /note="Description of Artificial Sequence: Synthetic coding sequence"
  source 1..441: mol_type = other DNA
atggcatcgcatagactgcttctgttgtgcctggcagggctggtgtttgtgtcagaggcgggcccaactggcactggagaatccaagtgcccactgatggtcaaggtgcttgacgccgtgcgcgggtcccctgcgattaatgtggcggtgcatgtgtttcgaaaggcagccgatgatacttgggaaccttttgcttccggtaaaacttccgagagcggagaactccatggattgaccactgaggaagagttcgtggaaggtatctacaaagtggaaatagataccaagtcgtactggaaggcgctgggtatctccccgtttcacgagcatgcagaagtggtgttcaccgcgaatgactctggtccccggcgatacactatcgcagcccttctctcgccatattcgtatagcaccatggctgtggtgacgaaccctaaggag

SEQ ID NO: 20262 - DNA, 441 bp, synthetic construct
  misc_feature 1..441: note = source = /note="Description of Artificial Sequence: Synthetic coding sequence"
  source 1..441: mol_type = other DNA
atggcctcacatcggcttctgcttctctgtctggcaggattggtgtttgtgtcagaagccgggcctactgggactggagagtcgaagtgcccactgatggtgaaggtgttggatgccgtcaggggatcccccgcaatcaatgtcgcagtccacgtctttagaaaagcggcagacgatacttgggaacctttcgcatcgggcaagacctcagaatccggagaactgcatggcctgaccaccgaggaagagttcgtcgagggtatatacaaggtggaaatcgacaccaagtcttactggaaggctctgggaatctcccctttccatgaacacgcggaggtggtgttcacggcgaacgattcgggtcccaggcgctacaccattgcagcccttttgtcgccatattcgtacagcacgatggcagtggtgactaacccaaaggag

SEQ ID NO: 20263 - DNA, 441 bp, synthetic construct
  misc_feature 1..441: note = source = /note="Description of Artificial Sequence: Synthetic coding sequence"
  source 1..441: mol_type = other DNA
atggcttctcaccggctattgctcctgtgcctggccggcctcgttttcgtaagcgaggccggccctactggcacaggtgaatccaagtgtcccctaatggtgaaggttctcgatgctgtgcgaggcagccctgccatcaacgtggcagttcacgttttcagaaaagccgccgatgatacgtgggagccatttgcctccggcaaaactagtgagagcggggaactccacggcctaacgaccgaggaggaattcgtagagggaatatataaggttgaaattgatacgaaatcttattggaaagccctgggcataagtcccttccatgagcatgcggaggtcgtgtttactgcaaacgattctggtcccaggcgttacaccatagctgccctgttgtctccctattcctactctacaatggcagtggtcacaaacccaaaggag

SEQ ID NO: 20264 - DNA, 441 bp, synthetic construct
  misc_feature 1..441: note = source = /note="Description of Artificial Sequence: Synthetic coding sequence"
  source 1..441: mol_type = other DNA
atggcaagccaccgccttctcctgctttgcctggcagggttggtgtttgtctccgaggcgggccctacgggtaccggagagtccaaatgtccattgatggtgaaagttcttgacgcagtacgagggagtccggccataaacgtggccgtgcatgtgttcaggaaggcagcggacgatacctgggaaccgtttgcgtccggaaagacttcggagtcaggtgaactccacggactgactacggaagaagagttcgtggaagggatctacaaggttgagattgataccaaatcgtactggaaggcccttggaatttcgccttttcatgaacatgcagaagttgtctttaccgcaaacgattcgggtccccggcgttataccatcgccgctcttctcagcccgtactcgtactctactatggccgtggtaactaatcccaaggaa

SEQ ID NO: 20265 - DNA, 441 bp, synthetic construct
  misc_feature 1..441: note = source = /note="Description of Artificial Sequence: Synthetic coding sequence"
  source 1..441: mol_type = other DNA
atggcctcccatcggctgctcttgctgtgcctggcaggccttgtcttcgtttctgaagccggaccaactggaaccggggaatccaagtgtccattgatggtcaaggtgctcgacgccgtgaggggaagcccagcgatcaatgtggctgtgcatgtgttccgaaaagccgcagacgacacctgggaaccgttcgcgtccggaaagactagcgagtcgggcgagctgcacggactcaccactgaagaagaatttgtggaagggatctataaggtggaaatcgataccaaatcgtactggaaggcactcggaatctcgcccttccatgaacatgcagaggtcgtgttcaccgcaaatgactcgggccctaggagatacactattgcagccctgctgtcaccgtactcatactccaccatggcagtggtcactaaccccaaggaa

SEQ ID NO: 20266 - DNA, 441 bp, synthetic construct
  misc_feature 1..441: note = source = /note="Description of Artificial Sequence: Synthetic coding sequence"
  source 1..441: mol_type = other DNA
atggcatcccataggttattgctgctctgtttggcgggacttgtattcgtaagcgaggctggtccgacaggtactggagagtctaaatgtccactcatggtgaaggtcctggacgcggtgcgcggatcccctgcaataaatgtggcagtgcacgtgttccgaaaggccgcagatgacacttgggaacccttcgcgagcggaaagactagcgagagcggggaactgcacgggctcactacagaggaagagtttgttgaaggaatctataaggtggagatcgacactaaatcttattggaaagcgctcggcatcagcccctttcatgagcatgctgaagtggtgttcactgccaatgactctggcccgcgcaggtacaccatcgctgcgctcctgtccccttattcgtattctaccatggccgttgtcacaaaccccaaggag

SEQ ID NO: 20267 - DNA, 441 bp, synthetic construct
  misc_feature 1..441: note = source = /note="Description of Artificial Sequence: Synthetic coding sequence"
  source 1..441: mol_type = other DNA
atggcctcccatagactgctccttctttgccttgccgggctggtgtttgtgtcggaagcaggacccaccggcaccggggaatctaaatgtcctcttatggtgaaggttctggacgccgtgagaggcagcccagcaatcaatgtcgctgtgcatgtgttccggaaagcagccgatgatacttgggaacctttcgccagcggaaagacttcagaatccggagagctgcatggattgactaccgaagaagagtttgtcgaaggaatctataaagtcgaaattgatactaagtcatactggaaggcactcggcatctccccgttccacgagcacgccgaagtggtgtttactgcaaacgactcggggcctagaagatacaccatcgccgcacttctgtcaccttacagctactccactatggcagtcgtgaccaaccccaaggaa

SEQ ID NO: 20268 - DNA, 441 bp, synthetic construct
  misc_feature 1..441: note = source = /note="Description of Artificial Sequence: Synthetic coding sequence"
  source 1..441: mol_type = other DNA
atggcttcacacaggttactgctgctgtgcctcgctggcctcgtctttgtaagtgaagccggtccaaccggtacaggtgagagcaagtgcccacttatggttaaagtactggacgccgttcgcgggagccctgcaatcaacgtggcggtccatgtcttccgcaaagccgctgatgatacctgggagccattcgctagcggcaagacaagtgaaagtggcgagctccacggactgacgaccgaggaagaattcgtggagggtatatacaaagtggagatcgataccaaaagctattggaaggcactgggaattagcccgtttcacgaacacgccgaagtggtttttactgcaaatgacagcggcccaagacgctatactattgctgcgctgctgagcccctactcttattcaacaatggccgtagtgaccaacccaaaggaa

SEQ ID NO: 20269 - DNA, 441 bp, synthetic construct
  misc_feature 1..441: note = source = /note="Description of Artificial Sequence: Synthetic coding sequence"
  source 1..441: mol_type = other DNA
atggcatcacaccgactcttacttctttgtctggcaggactcgtgttcgtgtcagaagcaggaccaacaggaacaggagaatctaaatgccccctaatggttaaggttttggacgccgttaggggaagtccagcaataaacgtggccgtgcatgtcttccgcaaggcggccgatgacacatgggaaccattcgcttccgggaaaactagtgaatcaggggaactccacgggctcacaactgaagaagaattcgttgaaggaatctacaaagtggaaatagatacaaaatcttattggaaagcactagggatatcacctttccacgaacatgcagaagtcgtctttacagcgaacgattctgggccacggcgctatactatcgccgccctgctaagtccttattcctattctactatggctgtggtcactaaccctaaagaa

SEQ ID NO: 20270 - DNA, 441 bp, synthetic construct
  misc_feature 1..441: note = source = /note="Description of Artificial Sequence: Synthetic coding sequence"
  source 1..441: mol_type = other DNA
atggcatctcacagattattattattatgtttagcagggttagtttttgtttctgaggcaggaccaacaggaactggtgaatcaaaatgtccattaatggttaaggttcttgacgcagttcgtggttctccagctattaatgttgctgtacatgttttcagaaaagcagctgatgatacatgggaaccattcgctagtggaaaaacttcagaatctggagaattacatggattaacaacagaagaagaatttgttgaaggaatttataaagttgaaattgatactaaatcatattggaaggctttaggtatttcaccttttcatgaacatgcagaggtagttttcactgctaatgatagtggtccaagaagatatactattgcagctttactttctccatactcttattctactatggctgttgttactaatccaaaagaa

SEQ ID NO: 20271 - DNA, 441 bp, synthetic construct
  misc_feature 1..441: note = source = /note="Description of Artificial Sequence: Synthetic coding sequence"
  source 1..441: mol_type = other DNA
atggcctcacaccggttgctgttactctgtcttgctgggctggtattcgtgtctgaggccgggccaaccgggacaggggagagcaaatgtcctctgatggtgaaggttctggacgctgtcaggggatcaccggccatcaatgttgccgtgcacgtgtttagaaaggccgctgacgatacgtgggagcccttcgcttccggcaaaacgagcgagtcaggcgagctgcacggtttgaccaccgaagaggaatttgtggagggtatctacaaagtggaaattgacacaaaaagctactggaaggccttgggaatctccccgtttcacgaacacgcagaggtggtgttcaccgccaacgactccggaccccgccgttatactattgccgctctgctgagtccatattcctactccacaatggctgtcgtgactaaccctaaagag

SEQ ID NO: 20272 - DNA, 441 bp, synthetic construct
  misc_feature 1..441: note = source = /note="Description of Artificial Sequence: Synthetic coding sequence"
  source 1..441: mol_type = other DNA
atggcttcccatcgtctgctgctgctgtgcctggccggcttagtctttgtctccgaggcaggccctaccggaaccggagagagcaagtgcccgctgatggtaaaggtcctcgacgctgttaggggaagcccagccattaacgtcgcagtgcacgtgtttcggaaagcagccgatgatacctgggagccgtttgcttcgggaaagacctcagagagtggggaacttcacggcctgaccaccgaggaggaattcgttgagggtatctacaaggtcgaaattgataccaagtcgtactggaaggcactggggatctccccttttcacgaacacgcggaagtggtgttcactgccaacgacagcggtcccagacgttacaccatcgccgccctgctgagtccgtatagctactcgaccatggctgtcgtcacaaacccaaaggag

SEQ ID NO: 20273 - DNA, 441 bp, synthetic construct
  misc_feature 1..441: note = source = /note="Description of Artificial Sequence: Synthetic coding sequence"
  source 1..441: mol_type = other DNA
atggcctctcatcgtctccttcttctctgtctggctggactcgtgtttgtatctgaggctggaccaactggcaccggtgagagcaaatgtcctcttatggtcaaagtcttggatgccgtcagaggatctccagcaattaacgtagccgttcatgtgttcaggaaagctgcagatgacacatgggaaccattcgcgagtggcaaaacgtccgagagcggcgagttacatggtcttaccacagaggaagagtttgtcgaaggtatctacaaagttgaaattgatacaaaatcttactggaaagcgttaggaatctctccatttcacgaacatgcagaagtcgtatttacagccaatgactctggtccacgaagatacacaattgcagccttgttaagcccatatagctactctactatggcagttgtaaccaacccaaaagag

SEQ ID NO: 20274 - DNA, 441 bp, synthetic construct
  misc_feature 1..441: note = source = /note="Description of Artificial Sequence: Synthetic coding sequence"
  source 1..441: mol_type = other DNA
atggcctctcatagactgttactgctgtgccttgcgggcttggtcttcgtcagcgaagccggaccaacaggcacaggggaatccaaatgcccgcttatggtgaaggtgctggacgcagtgagaggaagccccgccattaatgtggctgtgcatgtattccgcaaagccgccgacgacacttgggagccatttgcgtcaggtaagacaagcgagtcaggtgagctccacggcctaactactgaagaagaattcgtggagggtatttacaaagttgaaatcgatactaagtcttattggaaagcccttggtatcagcccttttcatgaacacgcggaggtcgtatttactgcaaacgattcaggacctcgccgctatactatagccgctctactctccccgtatagctacagtaccatggctgtggtaacgaatcctaaagag

SEQ ID NO: 20275 - DNA, 441 bp, synthetic construct
  misc_feature 1..441: note = source = /note="Description of Artificial Sequence: Synthetic coding sequence"
  source 1..441: mol_type = other DNA
atggcttcacaccgtcttctgttattgtgcctcgccgggctggtgttcgtatccgaggccggccctaccgggacaggggagtcaaagtgccctctcatggtgaaagtcctggacgccgtgcgagggtccccggcgattaacgtcgcggttcacgtgttccgcaaagccgccgacgatacctgggagccctttgccagcggcaagaccagcgaatctggagaactgcacggtctgacaaccgaggaggaattcgtggagggaatctacaaggtggagatagataccaaatcttactggaaagcactgggcatctcccctttccacgagcacgcggaggtggtcttcaccgctaacgattccggccctcggagatacaccatcgctgctctcctgagcccttactcgtactccactatggccgtcgttacgaacccaaaggaa

SEQ ID NO: 20276 - DNA, 441 bp, synthetic construct
  misc_feature 1..441: note = source = /note="Description of Artificial Sequence: Synthetic coding sequence"
  source 1..441: mol_type = other DNA
atggccagccatcggctgctgcttctgtgccttgctggactcgtctttgtgagcgaagccggaccgaccggaactggggaatccaagtgtccgctgatggtgaaggtgcttgatgccgtgcggggatcgccggcaatcaacgtcgcagtgcacgtgttcagaaaggccgctgacgatacctgggaaccgtttgcgtcgggaaaaacttccgaatccggagaactccatggtctgactactgaggaagagttcgtcgagggaatctataaggtggagatcgacactaaatcgtactggaaagccctcggcatttcacctttccatgagcacgcggaagtggtctttacggccaatgactctggtccccgccgctacacgatcgcggcgcttctgtcgccatacagctactcgactatggcggtcgtgaccaatccaaaagaa

SEQ ID NO: 20277 - DNA, 441 bp, synthetic construct
  misc_feature 1..441: note = source = /note="Description of Artificial Sequence: Synthetic coding sequence"
  source 1..441: mol_type = other DNA
atggcgtcacatcgcctgcttctgctctgcttggctggcctggtctttgtctccgaagcaggaccaaccggaaccggcgaatcgaaatgtcctttgatggtgaaggtgttggatgcagtgagaggatcccctgcaatcaacgttgcagtgcatgtgtttcggaaggcggccgacgacacctgggagccattcgcgagcggtaagacctccgaatcgggagaacttcacggactcaccactgaagaggaatttgtggaaggtatctacaaggtcgaaatagatactaagtcctactggaaggcccttggtatttcaccatttcatgaacatgctgaggtggtgttcactgcaaatgatagcggaccacgcagatacactattgcagcactgctgtccccgtactcctactcaaccatggcagtggtcaccaaccctaaggaa

SEQ ID NO: 20278 - DNA, 441 bp, synthetic construct
  misc_feature 1..441: note = source = /note="Description of Artificial Sequence: Synthetic coding sequence"
  source 1..441: mol_type = other DNA
atggcctcgcatagactcttgctgctgtgcctcgccgggttggtgttcgttagcgaggcgggtcctactggaactggcgaatcaaagtgcccgctgatggtgaaagtgcttgatgcagtccgcggatcaccggccatcaacgtcgccgtgcacgtgttccgcaaggccgcggacgacacgtgggaaccattcgcgtcaggcaagacctcagaaagcggggagctccatgggctgactactgaggaagagttcgtggagggcatctacaaggtggaaatcgataccaagtcgtactggaaggcgctcggaatctccccgttccacgagcacgccgaagtcgttttcactgctaacgattcgggaccacgccgctacactattgcggcgttgctctctccgtactcatactccactatggccgtggtgactaatcccaaggaa

SEQ ID NO: 20279 - DNA, 441 bp, synthetic construct
  misc_feature 1..441: note = source = /note="Description of Artificial Sequence: Synthetic coding sequence"
  source 1..441: mol_type = other DNA
atggcatcccaccgcttgcttctgctttgtctggcaggactggtttttgtgtccgaagccggacctaccggcaccggggagtcgaagtgtcccctgatggtgaaggtgctggacgcagtcagaggttcgcctgcaatcaatgtggccgtgcatgtgtttaggaaagcagccgacgatacttgggaaccatttgcatcgggtaaaactagcgaatctggtgagctgcatgggctcactactgaggaagaatttgtcgagggaatctacaaggtggaaattgataccaagtcgtactggaaggcactgggtatctcccctttccatgagcacgcagaggtggttttcactgccaacgatagcggacccagaagatacactattgcagcacttctgtccccttacagctactctactatggccgtcgtgaccaacccaaaggaa

SEQ ID NO: 20280 - DNA, 441 bp, synthetic construct
  misc_feature 1..441: note = source = /note="Description of Artificial Sequence: Synthetic coding sequence"
  source 1..441: mol_type = other DNA
atggcctcccaccgactgctgttgctgtgcctcgctgggctcgtctttgtgtccgaagctggccccaccgggacaggggagtcaaagtgccctttgatggtgaaggtgttggacgcggtgagaggttcacccgctattaatgtggctgttcatgtctttcgcaaagcagctgacgatacttgggagccatttgcttccggcaaaacatccgagtctggtgagttgcacgggctcaccaccgaggaggagttcgtggagggaatctataaagtcgaaattgacaccaagtcatattggaaggccctgggcataagtccttttcacgaacacgctgaggtagtgttcacggcgaacgacagtggccctcggcgatacaccattgcagccctgctgtctccttactcttattcaaccatggctgttgtcacaaaccccaaagaa

SEQ ID NO: 20281 - DNA, 441 bp, synthetic construct
  misc_feature 1..441: note = source = /note="Description of Artificial Sequence: Synthetic coding sequence"
  source 1..441: mol_type = other DNA
atggctagtcaccgactgctgctgctgtgcctggcagggctggttttcgtctcagaagcaggcccaacaggcaccggcgaatcaaagtgccccttgatggtaaaggtgttggacgcggtgcgtgggtcccccgctatcaacgtggcagtgcatgttttccgcaaggcagccgatgacacctgggaacctttcgcgtccggtaagactagcgagagcggcgaactccacggcttgacgacagaggaggaattcgtggaggggatttataaagttgaaatcgacacgaagagttactggaaagccctaggaatcagccccttccacgaacacgccgaagtcgtttttactgcaaatgacagcggcccccggaggtataccattgctgccctgttgagtccttacagttacagcaccatggccgtggtgacgaatccaaaagag

SEQ ID NO: 20282 - DNA, 441 bp, synthetic construct
  misc_feature 1..441: note = source = /note="Description of Artificial Sequence: Synthetic coding sequence"
  source 1..441: mol_type = other DNA
atggcatcccaccgacttttgctgctctgcttggcaggccttgtgttcgtgtccgaggccggaccaaccggaaccggcgaaagcaagtgtccccttatggtgaaggtccttgacgccgtccggggatcccctgcaattaacgtggccgtgcatgtgtttagaaaggcagccgatgatacctgggaaccatttgcttccggaaagaccagcgaatccggagaattgcatgggctgactactgaagaagagttcgtggaaggaatttacaaggtcgaaattgatacgaagtcatactggaaggcacttggaatatcaccttttcatgagcacgccgaggtcgtgtttacggctaatgacagcggtcctaggcggtacaccattgccgcacttctgtccccgtattcgtactcgaccatggcagttgtgactaaccccaaggag

SEQ ID NO: 20283 - DNA, 441 bp, synthetic construct
  misc_feature 1..441: note = source = /note="Description of Artificial Sequence: Synthetic coding sequence"
  source 1..441: mol_type = other DNA
atggcttcacacaggcttctcctgctttgcctagctggcctggtgtttgtctccgaggccggaccgaccggcaccggtgagtccaagtgcccactgatggtgaaagtgctggatgcagtccgtggcagcccagcgattaacgtcgccgtgcatgtttttaggaaggctgcagacgacacttgggagcctttcgccagcggcaagacttctgagtcaggagagctgcatgggttaaccaccgaggaggagttcgttgagggtatttataaagtggagatagataccaagtcctactggaaggccctagggatatcacccttccatgagcatgccgaagtggtctttacagcaaacgattcggggccgagaaggtacaccatagccgccttgttgtctccatatagctacagcactatggccgtggtgaccaaccctaaagag

SEQ ID NO: 20284 - DNA, 441 bp, synthetic construct
  misc_feature 1..441: note = source = /note="Description of Artificial Sequence: Synthetic coding sequence"
  source 1..441: mol_type = other DNA
atggcgtcccacaggttgctgctgctgtgccttgccggactggtctttgtctcggaagcggggccgactggtacgggagaatcgaagtgtcccctgatggtgaaagtgctcgatgccgttagaggctccccagccattaacgtcgcggtgcacgtgttccgcaaggctgcggatgacacctgggaaccgttcgccagcggcaagacctctgagagcggcgagttgcatggactgaccactgaggaagaatttgtggaaggtatctacaaagtcgagatcgacaccaagagctactggaaagcactgggaatctcgcctttccacgaacatgcagaggttgtattcacggctaacgactccggtccacgtcggtacactatcgccgccttgctcagtccctactcttattcgactatggcagtggtgaccaatccgaaggag

SEQ ID NO: 20285 - DNA, 441 bp, synthetic construct
  misc_feature 1..441: note = source = /note="Description of Artificial Sequence: Synthetic coding sequence"
  source 1..441: mol_type = other DNA
atggcgtcgcatcgattactactactatgtttagcgggtttagtatttgtatcggaagcgggtccgacgggtacgggtgaatcgaaatgtccgttaatggtaaaagtattagatgcggttcgaggttcgccggcgataaatgtagcggtacatgtttttcgtaaagcggcggatgatacgtgggaaccgtttgcgtcgggtaaaacgtcggaatcgggtgaactacatggtctaacgacggaagaagaatttgttgaaggtatatataaagtagaaatagatacgaaatcgtattggaaagcgctaggtatatcgccgtttcatgaacatgcggaagtagtatttacggcgaatgattcgggtccgcgtcgttatacgatagcggcgctactatcgccgtattcgtattcgacgatggcggttgttacgaatccgaaagaa

SEQ ID NO: 20286 - DNA, 441 bp, synthetic construct
  misc_feature 1..441: note = source = /note="Description of Artificial Sequence: Synthetic coding sequence"
  source 1..441: mol_type = other DNA
atggcaagtcatcgtttattgcttctatgcttggctgggctggtatttgtttcggaggcaggacctactggaaccggtgagtccaagtgtccacttatggttaaggtgttggatgctgttaggggttctcccgctataaacgtggcagtgcacgtgttccgtaaagctgctgatgacacgtgggaaccattcgctagcggaaagacttccgaatcaggggagttgcacggacttaccactgaagaagaatttgtagaaggtatttataaagtagaaattgataccaagtcttattggaaagcactcggaatatccccatttcacgagcatgctgaggtcgtcttcaccgccaatgattcaggcccgagaagatatacgattgccgcgttgctcagcccttattcatacagtacaatggcggtggtgacaaaccccaaggag

SEQ ID NO: 20287 - DNA, 441 bp, synthetic construct
  misc_feature 1..441: note = source = /note="Description of Artificial Sequence: Synthetic coding sequence"
  source 1..441: mol_type = other DNA
atggcaagccacaggttactgctgctctgtctcgccggtttagtatttgtaagcgaagcaggaccaaccggtacgggcgaatctaagtgcccactaatggttaaagtccttgacgcggtccgcggctcgccggccattaatgtcgcggtgcacgtctttcgtaaggcagctgacgacacatgggagcccttcgccagtggcaaaactagtgagagcggcgagctgcatggacttaccaccgaggaggagttcgtcgaaggtatttacaaggtggagattgataccaagtcgtattggaaggctttgggaatttcccctttccacgaacacgctgaggttgtcttcacggcaaatgactcgggccctcgtcgctacactatcgcggcgctcttgtctccctactcctatagtactatggcggttgtcactaacccgaaagag

SEQ ID NO: 20288 - DNA, 441 bp, synthetic construct
  misc_feature 1..441: note = source = /note="Description of Artificial Sequence: Synthetic coding sequence"
  source 1..441: mol_type = other DNA
atggcatcgcacagattgcttctgctgtgccttgccggactcgtgtttgtgtccgaagcaggaccaaccgggactggcgagtccaagtgtcctctcatggttaaagttctggatgcagtacgtggtagtcctgcaataaacgttgcggtgcatgtgttccgaaaggcagccgatgacacgtgggaaccatttgcgagcggtaagacctcggaatcgggagagctccatggacttactactgaggaggaatttgtagaaggaatttacaaggtggaaatcgacactaaatcttattggaaagcactgggtatttcaccgttccatgagcacgcagaagtcgtctttacggctaatgactcgggccccagaaggtacactattgcggccttgctgtcaccctactcctactcgacgatggcagtcgtgaccaacccaaaggaa

SEQ ID NO: 20289 - DNA, 441 bp, synthetic construct
  misc_feature 1..441: note = source = /note="Description of Artificial Sequence: Synthetic coding sequence"
  source 1..441: mol_type = other DNA
atggcctcccaccgcctgctgctgctctgcctggctggccttgtgttcgtgagcgaggcaggacccacgggcaccggggagagcaagtgcccactcatggtgaaggtgcttgacgccgtcagagggtctcccgccatcaatgttgcagtgcacgtgtttagaaaggcggcggacgatacctgggaaccattcgccagcggtaagacgagtgaatcgggcgaactccatggcttgaccaccgaggaggagttcgttgagggtatttataaggttgagatcgatacaaaaagctactggaaggccttagggatatcaccctttcatgagcacgccgaggtggtgttcactgccaacgactctggacccagacgttacaccattgccgcactgctgtcgccttattcctatagcacgatggctgtcgtgacgaatcctaaggaa

SEQ ID NO: 20290 - DNA, 441 bp, synthetic construct
  misc_feature 1..441: note = source = /note="Description of Artificial Sequence: Synthetic coding sequence"
  source 1..441: mol_type = other DNA
atggctagtcatagactccttctcctttgtcttgcagggctcgtgttcgtttccgaagccgggcctacaggaactggagagtctaaatgcccattgatggtgaaagtcctcgatgctgtccgcggatcccccgcgataaacgtagctgtacatgtttttaggaaagcagccgatgatacttgggaaccgttcgcatctggaaaaacttctgaatcaggagaattacatggactgacaactgaagaagaattcgtggaagggatctataaagtagagatcgatacaaaaagttactggaaagccctggggatatcgcctttccatgaacacgctgaagtggtttttacagctaacgattcaggaccacgaagatacacaatcgctgctctactctcaccttattcttactctactatggcggtagtcacaaatcccaaagag

SEQ ID NO: 20291 - DNA, 441 bp, synthetic construct
  misc_feature 1..441: note = source = /note="Description of Artificial Sequence: Synthetic coding sequence"
  source 1..441: mol_type = other DNA
atggcaagccacaggctcctcctgctgtgcctggccggcctggtctttgtctccgaagccgggcccaccggaacgggcgaaagcaaatgtccactgatggtgaaggtgctggatgccgttagaggatctccggcaatcaacgtggcggtccatgtgtttcggaaggccgcagacgatacttgggaaccttttgcttcggggaaaacgtctgagtcaggagaactccacggactcaccactgaagaagagttcgtggaaggaatctacaaggttgaaattgacaccaagtcctactggaaggcactcgggatttctcctttccatgagcatgccgaggtggtgttcactgcaaacgattcaggaccgcgcagatacactatagcagcgttgctgtcgccttactcctactccactatggccgtggtgaccaatccaaaggaa

SEQ ID NO: 20292 - DNA, 441 bp, synthetic construct
  misc_feature 1..441: note = source = /note="Description of Artificial Sequence: Synthetic coding sequence"
  source 1..441: mol_type = other DNA
atggctagccaccgtctgcttctcctctgcctcgccggcctggtgtttgtctccgaggccggacctactggaactggggaaagcaaatgtcctctcatggtcaaagtcctcgacgctgtgcgtggtagccctgcaatcaacgtggcggtgcatgtgtttcgaaaggcagcagatgatacctgggagcccttcgcatccggtaagacttccgagagcggagaactgcatggccttaccacggaggaggaatttgtggaaggaatttacaaggtggaaattgataccaaatcctactggaaagcactgggcatatcaccctttcatgagcacgcagaagtcgttttcaccgccaacgattcgggtccgaggagatacactattgctgccctgcttagcccttactcctattctaccatggcagttgtgaccaacccaaaagag

SEQ ID NO: 20293 - DNA, 441 bp, synthetic construct
  misc_feature 1..441: note = source = /note="Description of Artificial Sequence: Synthetic coding sequence"
  source 1..441: mol_type = other DNA
atggcttcccaccgcctactgctgctgtgcctcgcaggcctcgtatttgtgtccgaggcaggccccaccggtaccggcgagagcaagtgtcctctgatggtgaaggtcttggacgcagtgaggggaagtccagcaattaatgtggcggtccacgtgtttcgcaaagccgccgatgacacttgggagcctttcgcctcaggcaaaacctcagaatccggcgagcttcacggtttgacaacagaggaggaattcgtggaaggtatctataaagttgagatcgatacgaagtcatattggaaggcgctcggcatatccccttttcatgaacacgctgaggtcgtgttcacggcaaacgattccgggcctcggcggtacaccatcgccgcacttctgagcccatatagttacagtacgatggcggtagtcactaatccaaaagag

SEQ ID NO: 20294 - DNA, 441 bp, synthetic construct
  misc_feature 1..441: note = source = /note="Description of Artificial Sequence: Synthetic coding sequence"
  source 1..441: mol_type = other DNA
atggcctcacaccgtctactgctgctatgtctggccggactcgtgtttgtgtcagaggcgggacctacaggcactggagagtccaaatgcccgctcatggtcaaggtcttggacgctgtccggggatcgcccgcaattaacgtggccgtccacgtctttagaaaggccgctgacgacacctgggagcctttcgcaagtgggaagactagcgaatctggggaactgcacggcctcacgactgaagaagagtttgtggaaggaatctataaggtggaaattgataccaagagctattggaaggctttgggcatctctccttttcatgaacatgctgaggtggtctttaccgccaacgattccggcccacgccggtataccattgcagccctgcttagcccttactcctatagtactatggctgtcgtgaccaatccaaaagag

SEQ ID NO: 20295 - DNA, 441 bp, synthetic construct
  misc_feature 1..441: note = source = /note="Description of Artificial Sequence: Synthetic coding sequence"
  source 1..441: mol_type = other DNA
atggcgagccacagattgctgctgctctgtctcgctggtctggtgtttgtctcagaggccgggccgactggcaccggcgagagcaagtgcccgctcatggtgaaagtactggacgcggtccgcggctcgcctgcgatcaatgtcgcagtgcacgtgtttcggaaggcggccgacgacacctgggaacctttcgcttccggaaagactagcgagtcaggagaactgcatggtcttaccactgaagaggaattcgttgagggtatctacaaagtggaaatcgatacgaagtcgtactggaaggctctgggcataagccccttccatgaacacgcagaagttgtattcactgcaaacgattcagggccaaggcgctacacgatcgccgcgctgctctccccatattcttactccaccatggccgtggttaccaaccccaaggaa

SEQ ID NO: 20296 - DNA, 441 bp, synthetic construct
  misc_feature 1..441: note = source = /note="Description of Artificial Sequence: Synthetic coding sequence"
  source 1..441: mol_type = other DNA
atggcgagccatagactgctcctcctgtgtcttgcggggctcgtgtttgtgtctgaagcagggccaactggaactggagaatcaaagtgccctctgatggtcaaggtgctggatgcggtgcgaggttcacccgccatcaacgtggccgtgcatgtgtttcgcaaggccgcagatgacacttgggagccttttgcttccggaaagacctcggagagtggagaactgcatggtctgactactgaagaggaatttgtggaaggtatttacaaggtggagattgatacgaagtcctactggaaagcacttggtatatcgcccttccacgaacatgcagaagtggtgtttaccgcgaatgactccggaccccggaggtacactatagcggcacttctcagcccatactcctattcgaccatggcagttgtcacgaaccctaaggag

SEQ ID NO: 20297 - DNA, 441 bp, synthetic construct
  misc_feature 1..441: note = source = /note="Description of Artificial Sequence: Synthetic coding sequence"
  source 1..441: mol_type = other DNA
atggcatcgcatagactgcttcttctctgcctcgcaggcttggtgttcgtgtccgaggcgggtccaaccggcactggtgaatcgaagtgtcctctgatggtgaaggtgctcgacgccgtccggggaagcccagcgatcaacgttgcggtgcacgtgtttcgcaaggccgctgatgacacctgggaacccttcgcatcgggtaagacctctgagtccggagagctccacggtctgaccaccgaagaagaattcgtcgaaggaatctacaaggtggagattgatactaaatcatactggaaagcattgggaatttctccttttcatgaacatgccgaggtcgtgtttaccgccaacgattcgggccctagacggtacactattgcagcgttgctgagcccatactcttattcaacgatggccgtcgttacgaatccgaaggag

SEQ ID NO: 20298 - DNA, 441 bp, synthetic construct
  misc_feature 1..441: note = source = /note="Description of Artificial Sequence: Synthetic coding sequence"
  source 1..441: mol_type = other DNA
atggccagtcaccgcctcctcctgttgtgcttggcagggctggtgtttgtaagcgaggcgggcccgacaggtaccggtgagagcaagtgccctctcatggtgaaagtgctggatgcagtacgagggtccccagcaatcaacgtggctgtgcatgtgtttaggaaggccgccgatgacacctgggagcccttcgcttcaggtaaaacgtctgaaagcggcgagctccatgggctgaccactgaggaagaatttgtagaaggcatatataaagtagaaatcgacacaaagtcctattggaaagcactgggcatctcccccttccatgaacacgcagaagtcgtgtttactgcaaatgattcgggtcctcgacgatatacaatcgccgcgctgctgtcgccctacagctattcaacaatggccgttgtgacgaaccccaaggaa

SEQ ID NO: 20299 - DNA, 441 bp, synthetic construct
  misc_feature 1..441: note = source = /note="Description of Artificial Sequence: Synthetic coding sequence"
  source 1..441: mol_type = other DNA
atggcaagtcatcggctcctgctcctgtgcctcgccggactggtatttgtcagcgaagccgggcccacaggaaccggggagtccaagtgtcctctcatggtaaaggtcctagatgcggtgaggggatccccagccatcaacgtggccgtgcacgtgtttagaaaggctgctgacgacacctgggagcccttcgcttccggcaaaactagcgagagcggggagctgcacggtttgacgacagaggaggaatttgtggaagggatctacaaggtcgaaattgacacaaagtcctactggaaagccctggggattagcccatttcacgagcatgccgaggtggtgttcacagcaaatgacagtggccccagacgctacacaatcgctgcccttctgtccccatactcctactcgactatggccgttgtgaccaaccccaaagag

SEQ ID NO: 20300 - DNA, 441 bp, synthetic construct
  misc_feature 1..441: note = source = /note="Description of Artificial Sequence: Synthetic coding sequence"
  source 1..441: mol_type = other DNA
atggcgtctcaccgtttgctactcctgtgccttgccgggctcgtatttgtttcagaggccggaccaaccgggacaggtgaatccaagtgccctctcatggtgaaagtcctggacgcagtcagagggtcacctgctattaacgtggctgtccacgtatttcgaaaagccgcagatgatacttgggaaccttttgcctccgggaagaccagcgagagcggagagttgcacgggctgactacagaagaagaattcgtggaagggatctacaaagttgagatcgacaccaagtcatattggaaggccctgggaatcagtccattccacgaacacgccgaggtagtgtttactgcaaacgactccggcccaagaagatacaccattgcagcccttctgtccccctactcttattctacaatggccgtcgtaacgaatcctaaggaa

SEQ ID NO: 20301 - DNA, 441 bp, synthetic construct
  misc_feature 1..441: note = source = /note="Description of Artificial Sequence: Synthetic coding sequence"
  source 1..441: mol_type = other DNA
atggctagccaccgattactccttttgtgcctggccgggctagtgtttgtgtcagaagctgggcccacagggactggtgagtccaaatgccctttaatggtaaaagtcctagacgctgtacgaggtagccctgccatcaatgtcgccgtccacgtgttccgcaaagccgctgatgacacttgggagccgttcgcttccggcaagacatcagagagtggcgagctccacgggttgaccactgaagaggagtttgtggagggcatatacaaggttgagatcgacaccaaaagctattggaaagccttggggatatccccttttcatgagcacgccgaagtcgtgttcacagccaatgactcgggccctcgtcggtacactattgccgccctgttgtctccatatagttattctactatggcggtggtgaccaatccaaaggag

SEQ ID NO: 20302 - DNA, 441 bp, synthetic construct
  misc_feature 1..441: note = source = /note="Description of Artificial Sequence: Synthetic coding sequence"
  source 1..441: mol_type = other DNA
atggcctcccacaggttgcttctcctgtgtctggcaggactcgttttcgtgtcagaagcggggcccaccggaactggagaatcaaagtgcccccttatggttaaagtccttgatgcagtgcgcggatcgccggccattaatgtggcagtgcatgtgtttagaaaggccgccgacgatacttgggagccgttcgcttccgggaaaacctcggaatccggcgaacttcatggtctgaccaccgaagaagaatttgtggagggaatctacaaagtcgaaatcgacactaaaagctactggaaggctcttggtatctcgccattccatgaacacgcagaagtggtgttcactgctaatgattcgggccctcggagatacaccatcgcagcgttgctttccccttactcgtacagcaccatggcagtcgtcacgaatcctaaggaa

SEQ ID NO: 20303 - DNA, 441 bp, synthetic construct
  misc_feature 1..441: note = source = /note="Description of Artificial Sequence: Synthetic coding sequence"
  source 1..441: mol_type = other DNA
atggcatcccaccggctgttgctgctgtgcctggcgggccttgtctttgtcagcgaggccgggccgacaggcaccggcgagtcaaaatgtccgttgatggttaaggttctcgacgctgtgcgcggttcccctgccatcaacgtggccgttcacgttttccgcaaagcagcggacgatacatgggagccttttgctagtggcaagacctccgaatcgggcgaactgcatggactgaccactgaggaagagttcgtggagggaatatataaagttgaaattgatacaaaatcctactggaaggctctaggtatctcgccattccatgaacatgccgaggttgtgtttacggccaatgattctggccctagaagatacactattgccgccctgctgtctccatactcctactctactatggcagtagtgacaaatcccaaggag

SEQ ID NO: 20304 - DNA, 441 bp, synthetic construct
  misc_feature 1..441: note = source = /note="Description of Artificial Sequence: Synthetic coding sequence"
  source 1..441: mol_type = other DNA
atggctagtcaccgtctgcttctgttgtgtttggccggcctcgtgttcgtgagtgaagccggaccgaccgggacgggggagtctaaatgtcccctgatggtgaaagtgttggatgcggtgcggggatctcctgctataaacgtggcagttcacgtcttccgaaaagcagcagatgatacctgggaacctttcgcttcaggcaaaacgtccgagagcggcgaactgcacggactaaccacggaggaggaattcgtcgaagggatctataaggtggagatcgacaccaaaagctactggaaggccctgggaatctccccattccatgaacacgccgaggtcgtcttcacagcaaacgactccggacctagacgatacacgattgccgccctcctgtctccctactcatattccactatggcggttgtgacaaatcccaaggag

SEQ ID NO: 20305 - DNA, 441 bp, synthetic construct
  misc_feature 1..441: note = source = /note="Description of Artificial Sequence: Synthetic coding sequence"
  source 1..441: mol_type = other DNA
atggcttcccacagactcctcctgctgtgtctggccggtcttgtgtttgtgtcagaagctggcccaaccggcaccggcgagagcaaatgcccccttatggtgaaggtcctcgacgctgttcgcgggtcacctgccattaacgtggcggtccacgtgtttaggaaggccgcggacgacacctgggaaccctttgcaagcggcaaaactagcgaatcaggggaacttcatggactcaccaccgaagaggaattcgtcgaagggatctacaaggtggagattgacacaaagtcatattggaaagccctggggatctccccctttcacgagcacgcggaggtagtctttactgctaacgactctggaccgagacgatataccattgcagcactcctgtctccatattcttacagcacaatggccgtagtgacgaaccctaaggag

SEQ ID NO: 20306 - DNA, 441 bp, synthetic construct
  misc_feature 1..441: note = source = /note="Description of Artificial Sequence: Synthetic coding sequence"
  source 1..441: mol_type = other DNA
atggcttcgcatcgccttctgctgctgtgtctggccgggcttgtgttcgtctcagaggccggaccgacggggactggcgaatccaagtgcccgctcatggtgaaagtgctggacgcagtgaggggatctccagccatcaacgtcgccgtgcatgtgttcagaaaggcagccgatgacacctgggaacccttcgcttcagggaaaacctcagagagcggagagctgcacggtctgaccaccgaggaagaatttgtggaaggaatctacaaggtggagattgatactaagtcttactggaaggcacttggtatcagcccgttccacgagcacgccgaagtggtctttactgcaaacgacagtggaccacggcgctacacgatcgcagcactgctctcgccctactcgtactccaccatggccgtggtcacgaatccgaaagaa

SEQ ID NO: 20307 - DNA, 441 bp, synthetic construct
  misc_feature 1..441: note = source = /note="Description of Artificial Sequence: Synthetic coding sequence"
  source 1..441: mol_type = other DNA
atggcatctcatcgcttactccttctgtgtttagccgggctcgtattcgtatcagaagccggccccacgggaacaggcgaaagcaaatgtcctcttatggtcaaggttcttgacgccgtaagaggaagccccgctattaatgttgctgtgcacgtttttaggaaagcagccgatgacacttgggagcccttcgcgtctggcaaaacctctgagtcaggcgaactgcatggcctgacgaccgaagaggaattcgtcgaaggaatttacaaagtggagattgatacaaagagctattggaaggccctcggtattagtcctttccacgagcacgccgaggtggtatttactgccaacgatagcggacctcgccggtacactatcgcagcactcttaagcccgtatagctactcaacaatggctgtggtgactaatcctaaggaa

SEQ ID NO: 20308 - DNA, 441 bp, synthetic construct
  misc_feature 1..441: note = source = /note="Description of Artificial Sequence: Synthetic coding sequence"
  source 1..441: mol_type = other DNA
atggccagccatcggttactactactctgcctggcaggtctcgtgttcgtttccgaggcaggaccgaccggcactggggagtccaagtgccctctcatggttaaggtgctagacgccgtaaggggctctcccgcaattaatgttgccgtacatgtcttccgaaaagcggccgatgacacctgggagcctttcgcctctggaaaaactagcgaatccggcgagctgcatggtctcacaactgaggaggagttcgtcgaggggatatataaagtggaaattgacactaaatcgtactggaaagctctcggcataagtccgtttcacgagcatgcggaagtagtgttcacagctaatgactccggcccgagaagatatacgatcgctgcgctgctgagcccgtatagttatagcacgatggccgtggtaactaatccgaaggaa

SEQ ID NO: 20309 - DNA, 441 bp, synthetic construct
  misc_feature 1..441: note = source = /note="Description of Artificial Sequence: Synthetic coding sequence"
  source 1..441: mol_type = other DNA
atggcctctcaccgcttgctcctactgtgtctcgctggactggtttttgttagcgaagccggaccaaccggcaccggagaatcgaagtgcccactcatggttaaggtgctcgatgctgtcagaggttctcctgctataaacgtggctgtgcatgtgttccgcaaggcagcagacgatacttgggaacccttcgcatccggcaaaaccagcgagagcggggagctccacggtcttaccacagaagaggaattcgtggaggggatctataaagtggagatagatactaagtcttactggaaggcgctgggaatatcacccttccatgagcacgctgaagtcgtcttcactgccaacgactctggtcccaggagatataccattgcagctttattgtccccatatagctacagtaccatggctgtggttaccaacccgaaggag

SEQ ID NO: 20310 - DNA, 441 bp, synthetic construct
  misc_feature 1..441: note = source = /note="Description of Artificial Sequence: Synthetic coding sequence"
  source 1..441: mol_type = other DNA
atggcatctcacaggctactgctcctgtgtttggccggactggtgttcgtgtccgaggccggaccaacaggaacaggagagagtaaatgtcccttaatggtaaaagtcttagacgccgttagaggatctcccgcgataaacgtggccgtgcacgtgtttcgcaaagccgcagatgatacttgggaaccttttgcctctggaaaaacatcggaatctggggaactgcatggactgactacagaagaagaatttgtagaagggatatacaaagtggaaatcgatacaaaaagttattggaaagctctcggaatctccccttttcacgaacatgcggaggtggtatttactgccaatgattcaggaccccgaaggtatacaatagccgcattgttatcaccttattcatattccacaatggcggtagttacaaatccaaaagag

SEQ ID NO: 20311 - DNA, 441 bp, synthetic construct
  misc_feature 1..441: note = source = /note="Description of Artificial Sequence: Synthetic coding sequence"
  source 1..441: mol_type = other DNA
atggcatcgcatcgcctgcttctgctctgccttgcggggcttgtgtttgtgtctgaggccggaccaaccggcaccggagagtctaaatgccctctgatggtgaaggtccttgacgccgtcagaggcagccccgcaatcaatgtggcggtccacgtcttccggaaagcagccgatgatacatgggagcctttcgcctctgggaaaacgagcgagtccggggagctccatggcctcaccactgaagaagagttcgtcgagggcatttataaggttgagatcgacactaagagttattggaaagctctgggcattagcccctttcacgagcacgctgaggtcgtattcaccgcgaatgactcaggacctagaagatataccattgcggcattgttatccccatactcctattcaacgatggctgttgttaccaaccctaaagaa

SEQ ID NO: 20312 - DNA, 441 bp, synthetic construct
  misc_feature 1..441: note = source = /note="Description of Artificial Sequence: Synthetic coding sequence"
  source 1..441: mol_type = other DNA
atggcaagccaccgtctattattgctgtgcttggccggcctggtgttcgtgtcagaagccggtcccacgggcacaggagagagcaagtgcccgctgatggttaaagtgttagacgccgtaaggggatcgcctgctattaacgtcgccgtccacgtcttccgcaaggctgcggatgatacctgggagccattcgcctcgggcaaaacatctgagagtggtgaactgcacggtctgaccactgaagaggaattcgttgaaggaatctacaaggtcgagattgataccaagagctattggaaagccctggggatttccccattccatgagcatgcggaggtagtattcacagcgaacgattccggaccgcgccgctacacgattgcggccctgctgagcccatacagctacagtaccatggccgtggttactaaccctaaggaa

SEQ ID NO: 20313 - DNA, 441 bp, synthetic construct
  misc_feature 1..441: note = source = /note="Description of Artificial Sequence: Synthetic coding sequence"
  source 1..441: mol_type = other DNA
atggcctctcatagactgctgttgctgtgcctggctggcctggtgtttgtgtcagaagccggaccaactggcaccggcgagtccaaatgtcctctgatggtcaaggtgctggatgcagttcgcggatccccggctatcaacgttgccgttcatgtgtttagaaaagcagccgacgatacctgggagccttttgccagtggaaagacgtccgaatcgggagaactccacggcctcaccaccgaagaagagttcgttgaagggatctacaaggtcgaaattgatacaaagagctactggaaagccttgggtataagtcccttccacgagcacgccgaggtggtgttcaccgccaacgattccggtcccaggagatacactatcgctgcattgctgtctccttactcctactctacaatggcagtggtgactaatcccaaagag

SEQ ID NO: 20314 - DNA, 441 bp, synthetic construct
  misc_feature 1..441: note = source = /note="Description of Artificial Sequence: Synthetic coding sequence"
  source 1..441: mol_type = other DNA
atggcgtcgcatcgactactactattatgtctagcgggtctagtatttgtatcggaagcgggtccgacgggtacgggtgaatcgaaatgtccgctaatggttaaagtattagatgcggtacgtggttcgccggcgataaatgttgcggtacatgtatttcgtaaagcggcggatgatacgtgggaaccgtttgcgtcgggtaaaacgtcggaatcgggtgaactacatggtttaacgacggaagaagaatttgtagaaggtatatataaagttgaaatagatacgaaatcgtattggaaagcgctaggtatatcgccgtttcatgaacatgcggaagtagtttttacggcgaatgattcgggtccgcgtcgttatacgatagcggcgctattatcgccgtattcgtattcgacgatggcggtagtaacgaatccgaaagaa

SEQ ID NO: 20315 - DNA, 441 bp, synthetic construct
  misc_feature 1..441: note = source = /note="Description of Artificial Sequence: Synthetic coding sequence"
  source 1..441: mol_type = other DNA
atggcctctcaccgcctgcttttgctgtgcctggccggtctggtcttcgtctctgaggcaggccctaccggtaccggggaatctaagtgtccattgatggtgaaagtactcgacgcggtgcggggctcacccgcaattaatgtagccgtccacgtgttcagaaaggcggctgatgatacttgggaaccattcgcctcagggaagacatcggagtctggtgaattgcacggactgactacagaggaagagttcgttgagggcatatacaaagtcgagattgatacaaaaagctactggaaagcactgggaatcagcccctttcatgaacacgctgaagtagttttcacagctaatgatagcgggcctcggaggtacaccatcgcagcactgctgagcccatactcttattctactatggccgtcgtaaccaatcccaaagag

SEQ ID NO: 20316 - DNA, 441 bp, synthetic construct
  misc_feature 1..441: note = source = /note="Description of Artificial Sequence: Synthetic coding sequence"
  source 1..441: mol_type = other DNA
atggcctcacatcggctcctgttgctgtgcctcgctggtctggtgtttgtgtctgaagccggcccaactggtaccggggagagcaagtgtccactcatggtgaaggtactggacgccgtcagggggtcaccagcaatcaatgtggcggtgcatgtcttcagaaaagccgcagacgatacctgggagcccttcgcatccgggaaaactagcgaatctggagagcttcatgggcttacaacagaggaggagtttgttgaaggcatttataaagtcgagatcgacacaaaatcttattggaaagctcttggcatcagcccctttcatgaacacgcagaggtcgtattcactgccaacgatagcgggccacggaggtacaccatcgccgccctgttgtccccctacagttattccacaatggccgttgttacgaacccaaaggaa

SEQ ID NO: 20317 - DNA, 441 bp, synthetic construct
  misc_feature 1..441: note = source = /note="Description of Artificial Sequence: Synthetic coding sequence"
  source 1..441: mol_type = other DNA
atggcaagtcatcgtcttctgctcctgtgtctggcaggtttggtgtttgtatccgaagcagggccaaccgggaccggtgaatcaaagtgtccactgatggtcaaggtgctggatgctgtgcgcggctctcccgctatcaatgtcgccgtgcacgtgttccggaaggcggctgacgacacctgggaaccctttgcaagtgggaaaaccagtgagtcgggagagctccatggcctcaccactgaagaggagttcgtggagggaatctataaggtggagatagataccaaatcctattggaaagctctggggatctccccttttcacgagcacgccgaggtcgtgttcacagcaaacgatagtggacctaggaggtatactatagctgctctattaagtccctattcatattcaaccatggctgtcgtgaccaaccccaaagaa

SEQ ID NO: 20318 - DNA, 441 bp, synthetic construct
  misc_feature 1..441: note = source = /note="Description of Artificial Sequence: Synthetic coding sequence"
  source 1..441: mol_type = other DNA
atggccagtcacagactgttactcctgtgcttagccggactggtgtttgtgtccgaggcaggccctacaggcaccggcgagagtaagtgccccctaatggttaaagttctcgatgctgtgaggggctcgcctgccatcaacgtggcagtgcacgtgtttaggaaagctgcagatgacacctgggagccctttgctagtggaaaaacttctgagagtggtgaactgcatggactgaccacagaagaggagttcgttgaaggtatctacaaagtggagatcgacaccaagagttactggaaggccctggggataagcccgttccatgagcacgcggaggtagtctttacagctaatgacagtggccctagaaggtacaccattgccgctctgctgtcgccatattcgtactcaacgatggctgtggtgacaaatccaaaggag

SEQ ID NO: 20319 - DNA, 441 bp, synthetic construct
  misc_feature 1..441: note = source = /note="Description of Artificial Sequence: Synthetic coding sequence"
  source 1..441: mol_type = other DNA
atggcctcacatcgcctcctcctgctgtgcctggctggcctggtgttcgtgagcgaggctggaccaaccggtaccggtgagtccaaatgcccactgatggtcaaagtcttggacgccgttagaggcagtccagcgattaacgtcgcagtgcacgtcttcagaaaagccgcggacgatacatgggaacccttcgctagtggtaaaacatctgagtcaggagagttgcacggactcactactgaggaagaattcgttgagggaatctataaagtggagattgacaccaagagttactggaaggcactgggcatctcacccttccacgagcatgccgaagtagtgtttacggcaaacgactctggcccacgcaggtatacaattgcagcactcctctctccttactcttacagtacaatggctgtggtaactaaccctaaggag

SEQ ID NO: 20320 - DNA, 441 bp, synthetic construct
  misc_feature 1..441: note = source = /note="Description of Artificial Sequence: Synthetic coding sequence"
  source 1..441: mol_type = other DNA
atggccagtcacaggctactcttattatgtcttgcagggcttgtttttgttagtgaagctggaccaacagggactggagaatctaaatgtccacttatggtaaaagtgctggatgccgtccgggggtcccccgcaataaacgtcgcggtgcatgtatttcggaaagccgcagatgatacatgggaaccatttgcctcaggaaagacttctgaaagtggagagctccacgggctcactacagaagaagaattcgtagaagggatctacaaagttgagatagacacaaagagttattggaaagccctaggaatctctcccttccacgaacatgccgaagtggtattcacagcaaatgactctggaccccgaagatatactatcgcagcactcctatccccctacagttactcaactatggccgtcgtgacaaaccctaaggag

SEQ ID NO: 20321 - DNA, 441 bp, synthetic construct
  misc_feature 1..441: note = source = /note="Description of Artificial Sequence: Synthetic coding sequence"
  source 1..441: mol_type = other DNA
atggcatcccaccgactacttcttttatgcttggccggactggtgtttgtttccgaagctggtcccaccggtaccggggagtcgaaatgtcccctgatggtaaaagtgctggacgccgttagagggtcccctgccataaacgtcgcagtccacgtcttccggaaggcggcggacgacacgtgggaaccattcgcctcaggaaagaccagtgagtcaggtgagctgcatggcctaacaaccgaagaagagtttgttgagggaatctataaggtcgagatagataccaagtcctactggaaggccttgggtatttccccctttcatgagcatgccgaggtggttttcactgcgaatgattcagggcctagaagatacacaattgcagcgctactaagtccgtactcatatagcacgatggccgtagtgaccaaccccaaagaa

SEQ ID NO: 20322 - DNA, 441 bp, synthetic construct
  misc_feature 1..441: note = source = /note="Description of Artificial Sequence: Synthetic coding sequence"
  source 1..441: mol_type = other DNA
atggcatcccatcgcctcctccttttgtgtcttgcaggtttggtgtttgtgtctgaggctgggcccaccggcaccggtgaaagcaagtgccccttgatggttaaagtcttggatgcagttcgtggctcacctgcaattaatgtcgcagtgcacgtgttcagaaaggccgcggatgatacgtgggaaccctttgcctcaggaaaaacttcggaaagtggcgagctgcacggtctgaccactgaagaggagtttgtggaaggcatttataaagtggagatagatacaaaaagttactggaaggcactgggaatctcccccttccacgaacacgccgaggtggtcttcactgccaatgattctggaccaagaaggtatacaatcgccgctctgttatccccttacagctattccaccatggctgttgtgaccaaccccaaagag

SEQ ID NO: 20323 - DNA, 441 bp, synthetic construct
  misc_feature 1..441: note = source = /note="Description of Artificial Sequence: Synthetic coding sequence"
  source 1..441: mol_type = other DNA
atggcctcccaccgcttgctcctgctctgcctggctgggttggtgtttgtgtctgaggcaggtcctaccggcacaggggaaagcaaatgcccacttatggttaaggtgcttgatgcagtccgggggtctcctgccatcaatgtagccgtgcacgtgtttcggaaggctgctgatgatacctgggagcctttcgcttccggcaaaacctccgagagcggggaactgcacggcttgaccaccgaggaagagtttgttgagggcatttataaggtagagatagatacaaaatcctactggaaagcgttaggcatctcccctttccacgaacacgcggaggtagtatttacagctaacgattccggtcctagacggtataccattgccgctctgttatccccttactcttattcaaccatggctgtcgtcactaacccgaaggag

SEQ ID NO: 20324 - DNA, 441 bp, synthetic construct
  misc_feature 1..441: note = source = /note="Description of Artificial Sequence: Synthetic coding sequence"
  source 1..441: mol_type = other DNA
atggctagccaccggctgttgttgctgtgtttagcagggcttgtgttcgtgagtgaggcaggtcctacaggcacgggtgaatccaagtgcccattgatggtaaaagttttagacgccgtgagggggtcccctgccattaatgtcgcagtgcatgtctttcgaaaagctgcagacgacacttgggagccatttgcatccggaaagacgagcgaatctggcgagcttcacggcttgacaactgaagaagagtttgtagaggggatttacaaggtggagatcgacactaaatcttactggaaagccctcggtatcagcccattccacgagcacgcagaggttgtgtttaccgcaaacgacagtggccctcggagatacaccatcgccgcactcctgagcccttactcctatagcaccatggccgtcgtgaccaaccctaaagaa

SEQ ID NO: 20325 - DNA, 441 bp, synthetic construct
  misc_feature 1..441: note = source = /note="Description of Artificial Sequence: Synthetic coding sequence"
  source 1..441: mol_type = other DNA
atggctagccaccgtctgctacttctgtgcctcgccggtctggtgttcgtatctgaggctggccccaccggcaccggggagagtaagtgcccactcatggtcaaagtacttgacgccgtgcgaggctctccggctattaacgtcgcagtccacgtgttcaggaaggccgctgatgacacctgggaaccttttgcatctggcaagacctctgaatcaggggagttgcatgggttgacaaccgaagaagaatttgtggagggcatttacaaggtagagattgatactaagtcatactggaaggccctcggaatcagcccttttcatgaacacgccgaggtcgtgttcaccgcaaacgattctgggcctagaaggtacaccatcgctgctctcctgtcgccttactcatatagcaccatggccgtcgtcacaaaccccaaagag

SEQ ID NO: 20326 - DNA, 441 bp, synthetic construct
  misc_feature 1..441: note = source = /note="Description of Artificial Sequence: Synthetic coding sequence"
  source 1..441: mol_type = other DNA
atggcctcacatcggctacttttgctctgtctcgccgggcttgtattcgtgagtgaagctggacccaccggaaccggtgagtcaaagtgcccacttatggtgaaggtgctggacgccgtcagaggctcccccgcaattaatgtggcagtccatgtgtttcggaaggctgccgatgatacttgggaaccatttgccagcgggaaaacatccgaatcaggcgaactccacgggctgacaaccgaggaagagtttgtagagggcatttataaggtggagatcgacactaaatcctattggaaagctctgggcatttcacccttccacgagcacgccgaagtggtatttaccgccaatgactctggaccccgtaggtatacgatcgccgcgctcctgtcaccctactcttacagcaccatggccgtggtaacaaatcctaaagag

SEQ ID NO: 20327 - DNA, 441 bp, synthetic construct
  misc_feature 1..441: note = source = /note="Description of Artificial Sequence: Synthetic coding sequence"
  source 1..441: mol_type = other DNA
atggctagccacagactgcttctgctgtgcctggcggggttagtctttgtgtccgaggctggacccaccggcacgggcgagtcgaagtgtcccttaatggtgaaggtgctggacgctgtccggggctctcccgccatcaatgtggcggtgcatgtattcaggaaggccgctgatgacacctgggagcccttcgcaagtggaaaaacctctgaatcaggcgaactgcacggcctgacaaccgaggaggaatttgttgaggggatctataaggtggaaatcgataccaagtcatactggaaagctcttggcatctccccctttcacgaacacgcagaggttgtgttcacggctaacgactcagggcccagaaggtacaccattgccgccctgctcagcccgtatagctactctaccatggcagtcgtgacgaatcccaaggag

SEQ ID NO: 20328 - DNA, 441 bp, synthetic construct; identical to SEQ ID NO: 20308
  misc_feature 1..441: note = source = /note="Description of Artificial Sequence: Synthetic coding sequence"
  source 1..441: mol_type = other DNA

SEQ ID NO: 20329 - DNA, 441 bp, synthetic construct
  misc_feature 1..441: note = source = /note="Description of Artificial Sequence: Synthetic coding sequence"
  source 1..441: mol_type = other DNA
atggcctctcacaggctcctcctgctgtgcttggccggactggtcttcgtgtccgaagctggtcctactggtaccggcgagtctaagtgccccctgatggtcaaggtcctcgacgccgttagaggcagtccagccattaatgtggccgtccatgtgttcaggaaggccgcagacgatacttgggagcccttcgcctccggtaagacatccgagtcaggtgaattgcatggtctcacaaccgaagaggaatttgtggaaggcatttataaggttgaaatcgacacaaagtcctattggaaagccctgggaatttctccttttcacgaacacgccgaggtggtgttcactgccaacgacagtggaccccgccgttacactatcgccgcccttctgtctccctactcctactccacaatggcagtcgtgacaaatccaaaggag

SEQ ID NO: 20330 - DNA, 441 bp, synthetic construct
  misc_feature 1..441: note = source = /note="Description of Artificial Sequence: Synthetic coding sequence"
  source 1..441: mol_type = other DNA
atggcttcccacaggctgctgttgctgtgcctcgccggcctcgtcttcgtttctgaagccggtccaacagggacaggagagagcaagtgccctttgatggtgaaagtgctcgacgctgttaggggttcacctgctattaacgtcgccgtgcacgtttttcgcaaggccgccgacgatacttgggagccattcgctagcggcaagacatctgagagcggggaactacacggcctaactacagaggaggaattcgtggaggggatctataaggtggagattgacaccaaatcctattggaaagccctgggaatttccccattccacgaacacgcagaggttgtgttcacggcgaacgattccgggcccaggcggtacaccattgccgccctgctgagtccgtattcttattccaccatggcagttgtgacaaatcccaaagaa

SEQ ID NO: 20331 - DNA, 441 bp, synthetic construct
  misc_feature 1..441: note = source = /note="Description of Artificial Sequence: Synthetic coding sequence"
  source 1..441: mol_type = other DNA
atggcttcacaccgactattgcttttgtgccttgcaggtcttgtattcgtgagtgaggcaggaccgacgggaacaggagaatccaaatgcccgttaatggtgaaagtattggatgctgttcgaggtagccctgctatcaacgtcgctgtccatgttttcagaaaagccgctgatgatacttgggagccgtttgcgagtggcaagacgtcagagtccggagaattacatggtttgacaacggaagaagaattcgtggaaggaatatacaaagtcgagattgatacgaagtcgtattggaaggccctaggaatcagtccatttcacgaacacgcagaagtagtgttcactgctaatgattctggaccacgaagatacacaatcgctgctttattatcaccatactcttactctacaatggcggtcgttactaacccaaaagag

SEQ ID NO: 20332 - DNA, 441 bp, synthetic construct
  misc_feature 1..441: note = source = /note="Description of Artificial Sequence: Synthetic coding sequence"
  source 1..441: mol_type = other DNA
atggcctcgcatagactactactattatgcctcgccggtctggtttttgtgagtgaggccggacccaccggtacaggcgagtccaagtgccctctaatggtcaaggtgctggacgccgttcgaggctcacctgctataaatgtggcggtacacgtcttccgcaaagctgcagacgatacttgggagccttttgcaagtggaaagaccagcgagagcggcgagctccacgggctgacaacagaggaagagttcgtggagggcatctataaggtggaaatcgataccaaatcttattggaaggccctcggaatcagccccttccacgaacatgcagaagttgtgttcactgccaacgattccggaccgcgcagatacacaatagccgctctgctctctccttatagttactccaccatggctgtggtgacaaatcctaaggaa

SEQ ID NO: 20333 - DNA, 441 bp, synthetic construct
  misc_feature 1..441: note = source = /note="Description of Artificial Sequence: Synthetic coding sequence"
  source 1..441: mol_type = other DNA
atggcctcacaccgcttgcttcttttgtgcctcgctgggctcgtctttgtttcggaagccggcccaaccgggacaggagagtcgaagtgtcctttgatggtcaaggttctcgacgccgtccgtgggtcccctgccattaacgtggcggtacacgtgtttcgtaaagctgctgatgatacatgggagcccttcgcatcgggcaagacctcggagtcaggagaattacatggactcaccacggaggaagaattcgtggaggggatctacaaagtggagattgatacaaaatcgtactggaaggcgctcggaatcagccccttccacgagcatgctgaggtggtatttacagccaatgactccggccctcgtcggtatacgatagctgcgctcctatctccttacagctattcgaccatggccgtcgtcactaaccccaaagag

SEQ ID NO: 20334 - DNA, 441 bp, synthetic construct
  misc_feature 1..441: note = source = /note="Description of Artificial Sequence: Synthetic coding sequence"
  source 1..441: mol_type = other DNA
atggcttctcataggcttctcctcttatgtttggccggactggtttttgtgagtgaagcaggtcccacagggacaggcgagagtaagtgtcctctgatggtgaaggtgctggatgctgtgcgtggatctcccgcaatcaatgtcgccgtccatgtgttcagaaaagctgcagatgatacctgggaacctttcgcgtctgggaagacgagtgaatcaggggagctgcacggattgacaaccgaagaagaatttgtagaaggtatatacaaggtagaaatcgataccaagagttactggaaagcattaggaatttcccctttccacgaacacgcagaagttgtcttcaccgccaacgactccgggccacggagatacacaattgccgcactcctgagcccttatagttactctactatggccgtggtgactaacccgaaggag

SEQ ID NO: 20335 - DNA, 441 bp, synthetic construct
  misc_feature 1..441: note = source = /note="Description of Artificial Sequence: Synthetic coding sequence"
  source 1..441: mol_type = other DNA
atggcctctcataggctactgttgctctgcctggccggcctggtcttcgtatctgaggctggccccactgggaccggggagagcaaatgtcccctgatggtgaaagtgctcgacgcggtaagaggatctccagcaatcaacgtggctgtgcacgtgtttagaaaagccgccgatgacacctgggagccgtttgcatctggaaagaccagcgagagcggggaattacacggactgactacggaggaggagtttgtagagggcatttacaaggtcgagatcgacaccaaaagctattggaaggctctgggaatctctccgtttcacgagcacgcagaagttgtgtttaccgcgaatgattcgggccctaggaggtataccatcgccgcgcttctttcaccatatagctactcaaccatggctgtggtcacaaaccccaaagag

SEQ ID NO: 20336 - DNA, 441 bp, synthetic construct
  misc_feature 1..441: note = source = /note="Description of Artificial Sequence: Synthetic coding sequence"
  source 1..441: mol_type = other DNA
atggcctcacaccggctgttgttgctgtgcctggccggtctggtcttcgtgtcggaggcgggcccgaccggcacaggcgaaagcaaatgcccattgatggtgaaagtgctggatgcagtgcggggctccccagctatcaacgtcgccgtgcatgtctttcgcaaggcagcggatgacacctgggaaccgtttgcttccggcaaaaccagcgagagcggtgagctgcacggcctgaccacggaggaggaatttgtcgaaggtatctacaaggtagaaatagacactaaaagctattggaaggctctcgggatcagcccgttccacgagcacgcggaggtggttttcacggctaatgatagcggccctcgtcgatacaccatcgcggcactccttagcccgtatagctactccaccatggcagtggtcacgaaccctaaagaa

SEQ ID NO: 20337 - DNA, 441 bp, synthetic construct
  misc_feature 1..441: note = source = /note="Description of Artificial Sequence: Synthetic coding sequence"
  source 1..441: mol_type = other DNA
atggcgtcccataggctgcttctcctgtgccttgccggcctggtgttcgtcagcgaagccgggcctacgggcaccggcgagagcaagtgcccactgatggttaaggtactggatgccgtacggggctcacctgctatcaatgttgccgtgcatgtgttcaggaaagctgccgacgacacttgggagcctttcgcctctgggaaaacatccgagtcgggagagctccatggtctcaccacggaggaggagttcgtggagggcatatataaggttgaaatcgatacaaaaagctactggaaagccttgggtatcagccccttccacgaacacgcagaagtcgtcttcaccgccaatgattctggcccacgccgatacaccattgccgccttgctgagtccatactcgtattcgactatggctgtcgttacaaaccctaaggag

SEQ ID NO: 20338 - DNA, 441 bp, synthetic construct
  misc_feature 1..441: note = source = /note="Description of Artificial Sequence: Synthetic coding sequence"
  source 1..441: mol_type = other DNA
atggcctctcatcgactgcttctcctgtgtctcgctggcctggtgtttgtttcagaggccggacccaccgggacaggcgagtccaaatgtcccctgatggtgaaggtgctcgatgctgtgagggggagccccgcaatcaatgtggccgtgcacgttttccggaaggccgccgacgatacctgggagcctttcgcatccgggaagaccagcgagagcggagaactgcacggcctcaccaccgaggaggagtttgtggaaggcatttacaaggtcgagatcgacacaaagagctattggaaagctctggggatttctcccttccatgaacacgcggaggtcgtgttcacagcaaatgactcaggaccccggcgatatacgatcgccgccctgctgagtccatattcctactcaactatggccgttgtcactaatcctaaggag

SEQ ID NO: 20339 - DNA, 441 bp, synthetic construct
  misc_feature 1..441: note = source = /note="Description of Artificial Sequence: Synthetic coding sequence"
  source 1..441: mol_type = other DNA
atggcctcacataggcttctgctcctctgtctggcgggactcgtgttcgtgagtgaagcaggaccaacaggcaccggtgagtccaaatgtccacttatggttaaggtgctcgacgccgtgagagggtcccccgcaattaacgtggccgtgcatgtcttccgaaaggccgccgatgatacttgggagcccttcgcgagcgggaagacgtccgaaagcggggagctgcacggactgaccactgaagaggaattcgtggagggaatctataaggttgagatcgacacgaaaagttattggaaagcactgggtatctcaccattccacgaacatgccgaagttgtgttcacagctaacgactccgggccaaggcgctacaccatcgcagccctgctctctccttacagttatagcactatggctgtggttaccaatccgaaggag

SEQ ID NO: 20340 - DNA, 441 bp, synthetic construct
  misc_feature 1..441: note = source = /note="Description of Artificial Sequence: Synthetic coding sequence"
  source 1..441: mol_type = other DNA
atggcttcacatcgattacttttactctgcttggcaggcctggtcttcgtgagtgaggcgggaccgacgggcactggtgaatcaaaatgtcctctgatggtcaaggttttagatgcagttcgtggttctcctgccattaacgtggcagtgcacgtttttcgtaaggcggcagatgatacatgggagccgtttgcatcgggaaaaacaagcgaatcaggggaattacacggtctgacaacggaggaggaatttgtggaaggtatctataaggtggaaattgatacaaaatcttattggaaagctcttggaatatcaccgtttcatgaacatgcagaagtggtttttacagcgaatgattctggcccgcgccgctacacgatcgcagcactgctctccccctattcgtactctacgatggccgttgtgacgaacccgaaggag

SEQ ID NO: 20341 - DNA, 441 bp, synthetic construct
  misc_feature 1..441: note = source = /note="Description of Artificial Sequence: Synthetic coding sequence"
  source 1..441: mol_type = other DNA
atggcttctcaccgcctgcttctgctatgtctcgcaggtcttgtcttcgtgtccgaagccggtcccacgggtaccggcgagagcaagtgccctctgatggtgaaggtccttgacgccgtccgcggttcccccgccattaatgtggcagtgcatgtcttcagaaaggctgccgacgacacatgggagccctttgctagcggcaagacctctgagtccggcgagcttcatggtctgacgactgaagaagaattcgtcgagggtatttacaaggtggagatcgacactaagtcctactggaaggctttaggtatcagccctttccacgagcacgcggaggttgtcttcaccgctaacgacagcggcccccgtaggtataccatcgcggcgctcttgtcgccctactcctacagtacaatggctgtcgtcaccaatcctaaggaa

SEQ ID NO: 20342 - DNA, 441 bp, synthetic construct
  misc_feature 1..441: note = source = /note="Description of Artificial Sequence: Synthetic coding sequence"
  source 1..441: mol_type = other DNA
atggcttctcatcgtctgttacttctttgtcttgcgggattggtttttgtttccgaggctggtcccaccggaacgggggagtccaagtgtcctttaatggttaaagtgttagatgcggtaaggggttctcctgcaattaatgtggcggttcacgtattcagaaaggctgctgatgatacctgggagccatttgctagtgggaaaacatctgagtctggtgaacttcatggtctcaccaccgaggaggagtttgtggaaggaatatataaggtcgaaatagatactaaaagttattggaaggcattgggaatctccccttttcatgaacatgcagaggtcgtgttcaccgctaacgattcaggcccacgcagatatacgattgctgccttgcttagcccatattcctatagcactatggcggtagttacaaaccctaaggaa

SEQ ID NO: 20343 - DNA, 441 bp, synthetic construct
  misc_feature 1..441: note = source = /note="Description of Artificial Sequence: Synthetic coding sequence"
  source 1..441: mol_type = other DNA
atggcaagccatagactgcttctgctatgcttagccggcctcgtgtttgtttctgaggccgggccaacaggaacaggtgagtccaagtgtccactcatggtaaaggtgcttgacgctgtgcgcggttcccctgcaataaatgttgctgtgcacgtgttcaggaaggctgcagacgacacttgggagccgttcgcttctgggaagactagtgagagtggcgaactacacggtctgactacagaagaggagtttgtagagggaatctataaggtggagatcgatacaaagtcctattggaaggccctggggatatctccgtttcatgagcacgccgaggtagtcttcaccgcaaatgacagcgggccgagacgatataccattgctgccttactgtccccctattcttactccacaatggccgtggtgactaaccccaaagag

SEQ ID NO: 20344 - DNA, 441 bp, synthetic construct
  misc_feature 1..441: note = source = /note="Description of Artificial Sequence: Synthetic coding sequence"
  source 1..441: mol_type = other DNA
atggcaagccacaggctgctcttgctttgcttagccgggctagtgttcgtctctgaggccggcccgactggcaccggggaatccaagtgtcctctcatggtgaaagtactcgatgccgtccggggatcgcccgctattaacgttgcagttcatgtctttaggaaggccgccgacgatacgtgggagccctttgcgagtggcaagactagcgagtcgggagaattgcacggattaacaaccgaggaggaattcgtggagggaatttataaggtagagattgacaccaagtcttattggaaagcccttggtatctcccccttccacgaacatgccgaggtagtgttcaccgccaacgattcaggacctaggcgctacacgattgccgcgctgctgagtccatacagctattccaccatggccgttgttaccaatcctaaagaa

SEQ ID NO: 20345 - DNA, 441 bp, synthetic construct
  misc_feature 1..441: note = source = /note="Description of Artificial Sequence: Synthetic coding sequence"
  source 1..441: mol_type = other DNA
atggcctcccaccggctgttgcttctgtgcctcgcaggtctggtctttgtgtccgaagctggcccgaccggcacaggagaaagcaaatgccccctgatggtgaaagtgctggacgccgtcaggggctcacccgcaatcaacgtggccgtgcatgtgtttcgaaaagctgcagacgacacatgggagccattcgccagtggcaaaacctccgagtcaggagaactccacggcctaaccacagaggaggagtttgtggagggcatttataaggtggagattgacaccaagagctactggaaagccctgggtatcagcccatttcatgaacatgccgaggtagtgttcaccgcgaacgactcaggaccaaggaggtacacgatcgctgctctgctgagcccatacagttactccactatggccgttgtgaccaatcccaaagaa

SEQ ID NO: 20346 - DNA, 441 bp, synthetic construct
  misc_feature 1..441: note = source = /note="Description of Artificial Sequence: Synthetic coding sequence"
  source 1..441: mol_type = other DNA
atggcatctcatagattacttcttctttgtttggctggattagtatttgtatcagaagctggtccaactggaactggagaaagtaagtgtccacttatggttaaagttcttgatgctgttagaggtagtcctgcaattaacgttgcagtacatgtttttcgtaaggctgctgatgatacttgggaaccattcgcatctggtaaaacttctgaatcaggagaacttcatggtttaactacagaagaagagtttgttgaagggatttataaagtagaaattgatacaaaatcatattggaaggcacttggaatatcaccattccatgaacatgcagaagttgtttttacagctaatgattcaggtccaaggcgatatacaattgcagctttattatctccatattcttattcaacaatggcagttgtaacaaatccaaaagaa

SEQ ID NO: 20347 - DNA, 441 bp, synthetic construct
  misc_feature 1..441: note = source = /note="Description of Artificial Sequence: Synthetic coding sequence"
  source 1..441: mol_type = other DNA
atggcatcacatagattactgctgctatgtctggccgggctagtcttcgtaagtgaggctggtcctacaggcaccggtgagagtaagtgccctctgatggtcaaagtgctggatgctgtccgcggctccccagctattaatgtcgctgttcacgtttttaggaaagccgctgacgatacatgggaaccctttgcttctgggaagaccagcgaatctggcgagctgcacggcttgaccaccgaggaggagtttgtggagggcatctataaggtcgagatcgacacaaaaagctattggaaggcactgggcataagcccctttcacgaacatgctgaagtggtgttcacagcaaacgacagcggcccaagacgatacactattgccgctctgctgagcccttatagttacagcaccatggccgttgtgacaaaccccaaggaa

SEQ ID NO: 20348 - DNA, 441 bp, synthetic construct
  misc_feature 1..441: note = source = /note="Description of Artificial Sequence: Synthetic coding sequence"
  source 1..441: mol_type = other DNA
atggcttcccacagactgctcctactgtgtctggcagggctggtcttcgtcagtgaagctggcccgactggtacaggcgaatctaagtgtcctctcatggtgaaggtgcttgacgccgtgagaggaagtccagccatcaacgtggccgtgcatgtgtttaggaaagccgccgatgacacttgggagccgtttgcctccggaaagacatctgaatctggcgagttgcacgggttgaccacggaagaagaatttgtggaaggaatctacaaagtggagatcgatactaagtcctactggaaggcccttgggatcagcccatttcatgagcatgctgaggtggtgttcacagcaaatgactccggtccaaggagatatactatcgccgcccttttgtctccctactcatattctaccatggcagtagtcaccaaccccaaagag

SEQ ID NO: 20349 - DNA, 441 bp, synthetic construct
  misc_feature 1..441: note = source = /note="Description of Artificial Sequence: Synthetic coding sequence"
  source 1..441: mol_type = other DNA
atggcctcacatagactactattactgtgcctggccggactagttttcgtgagcgaggccggccctaccggaaccggagaatcaaaatgccccttgatggtcaaggtcttagacgccgtccgaggttctccagccattaacgtggctgtgcacgttttccgcaaggcggccgacgacacctgggagcccttcgccagtggaaagacctccgaaagtggagagctgcacgggctcacaactgaagaagagtttgtggaaggtatctacaaggtggagatcgatacaaaaagctattggaaagcactggggatctccccatttcatgagcacgctgaggtcgtgttcactgcaaatgattccgggcctcgacggtataccatcgctgccctgctgagtccctacagttattctaccatggccgtggtaaccaatcctaaggaa

SEQ ID NO: 20350 - DNA, 441 bp, synthetic construct
  misc_feature 1..441: note = source = /note="Description of Artificial Sequence: Synthetic coding sequence"
  source 1..441: mol_type = other DNA
atggcaagtcatcgcttgctcctgctatgtctggccgggctggtcttcgtgtctgaagccgggcctacaggaacaggcgagtctaaatgccccctgatggtgaaggtactggatgctgtgaggggcagccccgctatcaatgtcgccgtccacgtattccggaaagcagccgatgacacttgggagccctttgcctccggcaaaacctccgagtccggcgagttgcatggtttaacgacagaggaggagttcgtggaaggcatttataaggtggagatcgatacgaagtcatactggaaggctttgggcatcagcccgttccatgagcatgccgaggtggttttcacagccaacgattccgggccaagacgatacaccatcgcagctctgctgtccccctacagttattccactatggccgtggtgacaaatcccaaggaa

SEQ ID NO: 20351 - DNA, 441 bp, synthetic construct
  misc_feature 1..441: note = source = /note="Description of Artificial Sequence: Synthetic coding sequence"
  source 1..441: mol_type = other DNA
atggcgtcccacagactactccttctctgcctggccggcctggtgtttgtgagtgaggccggccccacaggtacaggggagagtaagtgccctcttatggtaaaagttctggatgcggtgcgtggcagccctgcgatcaatgtggccgtgcacgtatttcgcaaagccgcagatgatacctgggagccatttgctagcggcaagacatccgagagtggcgaattgcacgggcttaccaccgaggaagagttcgtggaggggatctataaggtcgaaatcgacactaagagctattggaaagcccttgggatcagccctttccacgaacacgcagaggtagtcttcacagctaatgatagcggcccgaggcgatacaccatcgccgcgctgctttctccgtattcttatagtacaatggcggtggtgacaaatcccaaggag

SEQ ID NO: 20352 - DNA, 441 bp, synthetic construct
  misc_feature 1..441: note = source = /note="Description of Artificial Sequence: Synthetic coding sequence"
  source 1..441: mol_type = other DNA
atggcctcgcacagactcctgcttctctgcctcgcaggacttgtcttcgtgtctgaggccggccccactggaaccggagagtcaaagtgcccactgatggtgaaggtgttggatgcagtccgtggcagcccagctattaacgtggcagtccacgtgttcaggaaggccgcagacgacacttgggagcctttcgcatctggaaaaacgtctgagagcggagaactgcatggtctgaccaccgaagaggagtttgtcgaaggaatttataaggtagagatcgacacaaagagttattggaaggcactggggatctccccattccatgaacacgctgaggtggtgttcaccgctaacgactctggtcccaggcggtataccattgccgccctgctgagcccttattcctacagcaccatggccgtggtgacgaaccccaaggag

SEQ ID NO: 20353 - DNA, 441 bp, synthetic construct
  misc_feature 1..441: note = source = /note="Description of Artificial Sequence: Synthetic coding sequence"
  source 1..441: mol_type = other DNA
atggcctcacacaggctacttcttttgtgtttggctggacttgtttttgtgagcgaggcgggcccaactggtaccggcgagtccaagtgcccgctcatggttaaggtgttagatgctgttagggggtctccagcaatcaatgttgccgtgcatgtcttcagaaaggcagccgatgacacttgggagccatttgcctctggaaaaactagtgagtctggggagctgcacgggctaaccactgaggaggagtttgtcgagggcatatataaggttgaaatcgacacgaagagctattggaaagcccttggaatcagtccctttcatgagcacgcagaggtcgtgtttacagctaatgatagtggccctcgcagatatactattgctgctcttctgtctccttactcctacagtacaatggcggtggttacgaacccgaaggag

SEQ ID NO: 20354 - DNA, 441 bp, synthetic construct
  misc_feature 1..441: note = source = /note="Description of Artificial Sequence: Synthetic coding sequence"
  source 1..441: mol_type = other DNA
atggcctcacatagattgttgctgctatgtttagcagggctggtcttcgtatcagaggcagggccgaccggaacgggagaaagcaaatgtccactgatggttaaagtgctggatgccgtgcgcggttctccagccataaatgtcgccgtccatgtctttcggaaagcagccgatgacacctgggagccatttgcctccggtaaaactagcgagtccggagagctccacggtctgacaacagaagaggagttcgtagagggaatttacaaagtcgagatcgacacaaaaagctattggaaggctctcggcatctcccccttccacgaacacgcagaggtagtctttactgccaacgattccggtcctaggaggtataccatcgcagctctattgtctccttattcctatagtactatggctgtggtcactaaccccaaagaa

SEQ ID NO: 20355 - DNA, 441 bp, synthetic construct
  misc_feature 1..441: note = source = /note="Description of Artificial Sequence: Synthetic coding sequence"
  source 1..441: mol_type = other DNA
atggcatcacaccgattactgttgctctgcctggccggactcgtgtttgtaagtgaagcaggccctaccggtactggcgaaagcaagtgtcctcttatggtgaaggtactggacgctgttagaggcagcccggctatcaacgtggcggtgcatgtgtttcgcaaggcggccgacgatacgtgggaaccatttgcttcaggcaagaccagcgagtctggagaactacatggcctgaccacggaggaggagtttgtggagggaatctacaaagtggaaattgacacaaagtcatattggaaggctctagggatttctcctttccacgagcatgcagaggtcgtgttcaccgcaaatgattccggtccaaggcgctacacgattgcggcacttctgtctccgtattcctactcgactatggcggtggtaacaaaccctaaagag

SEQ ID NO: 20356 - DNA, 441 bp, synthetic construct
  misc_feature 1..441: note = source = /note="Description of Artificial Sequence: Synthetic coding sequence"
  source 1..441: mol_type = other DNA
atggcatcacacaggctgcttttgttatgtctagctgggctcgtcttcgtaagtgaagcaggcccaactgggacgggcgagtccaagtgccccttgatggtgaaggtcctcgacgcagtgcgaggaagtccagcgatcaacgtagcagtgcatgtgtttcgcaaagcagcggacgacacatgggaacccttcgctagtggaaaaacctccgagtcaggcgagctgcacgggctgacaaccgaggaggaatttgttgaggggatctataaggtcgaaatcgataccaaatcctattggaaggccttgggaattagcccattccatgaacacgccgaagtggtgtttaccgcaaacgactctggtcctcggcgctacacgatcgctgctcttctgtcaccgtattcatactcaactatggcagtggtaactaaccccaaggag

SEQ ID NO: 20357 - DNA, 441 bp, synthetic construct
  misc_feature 1..441: note = source = /note="Description of Artificial Sequence: Synthetic coding sequence"
  source 1..441: mol_type = other DNA
atggcctcgcacaggctgctgctgctttgtctggcagggctcgtttttgtcagcgaagccggaccaactggcaccggagaatcgaagtgcccgctgatggtgaaagtcctggatgccgtgcggggctcgccggccattaacgtggcggtgcatgtgttcagaaaggcagcagacgacacctgggagccgttcgctagcggaaagactagcgaatcaggggagctccacggcttgacgaccgaggaggaattcgtcgaaggtatctacaaggtcgagatcgataccaagtcttactggaaggcgctgggaatctccccctttcacgagcatgctgaagtggtgttcactgcgaatgactccggacctcgccgctacaccatcgctgccctcctctcaccttattcctactcgactatggccgtggtgactaacccaaaagaa

SEQ ID NO: 20358 - DNA, 441 bp, synthetic construct
  misc_feature 1..441: note = source = /note="Description of Artificial Sequence: Synthetic coding sequence"
  source 1..441: mol_type = other DNA
atggcttcccacagactactactgctttgtttggctggccttgttttcgtgtcagaagcaggccccacagggactggcgagtccaagtgtcctcttatggtgaaggtgcttgatgcggtaagggggagcccagcaataaacgttgccgtgcatgtgtttcgcaaggctgccgacgacacctgggaaccctttgcctccggcaaaacatctgaatcaggtgagttacacgggctcacaacagaagaggagttcgtcgagggaatctataaagtcgagattgatacgaaaagttattggaaagccttaggtataagtccgttccatgagcacgcagaggtggtcttcactgcaaatgactcaggcccccgccgatatacaattgccgcgcttttgtccccctacagttacagtactatggctgtcgtgactaatccgaaggag

SEQ ID NO: 20359 - DNA, 1170 bp, synthetic construct
  misc_feature 1..1170: note = source = /note="Description of Artificial Sequence: Synthetic coding sequence"
  source 1..1170: mol_type = other DNA
atgaacggcacccgaaattggtgtaccctggtcgacgttcatcccgaggaccaagctgccggatcagtggatatcctcagactgaccctgcaaggggaacttactggggatgagctagaacacatcgcccagaaagctggcaggaaaacctatgcaatggtcagctctcactcagcaggacattcattggccagtgagctggtggagtcgcacgacggccatgaggagatcattaaagtctacctaaaggggcgctctggcgacaagatgatccatgaaaagaacatcaatcagctgaagtcagaggtccagtatatccaggaggcaaggaactgcttacaaaagctgcgtgaggacatctcatctaaattggatcgtaatctaggcgattctctgcaccgccaggaaatccaggtcgtgctcgaaaagcctaacggattctctcagagcccaaccgccctgtactcatctccaccggaagtggatacctgcatcaacgaagacgtggaaagcttgaggaaaacagtacaggaccttcttgccaaacttcaggaggccaagcgacagcatcagtccgattgtgtggcctttgaagtgaccctgtcgaggtatcagcgtgaggcagaacagtcgaatgtcgcattacagagggaggaggatcgagttgaacagaaagaagccgaagtgggagagctccagcgcaggctgttgggcatggagacggaacatcaagccctcctggccaaagtgagggagggagaggtcgcgctggaggaactgagatctaataacgctgattgccaggccgaacgagaaaaagcagcaaccctggagaaggaagtcgcaggcctcagggaaaagatccaccacctagacgatatgctgaaaagtcagcagcgcaaggtacgacagatgatcgaacagcttcagaacagcaaagcggttattcagagcaaggacgctaccattcaggagctgaaagaaaagattgcctacctggaggcggaaaacctggagatgcatgatcgaatggaacacctgatcgagaaacagatctcccacgggaacttcagcacacaggcacgcgctaaaaccgaaaatcccggtagcattcggatttccaaaccaccttcccctaaacctatgcccgtcatccgtgtggtggagacg

SEQ ID NO: 20360 - DNA, 1170 bp, synthetic construct
  misc_feature 1..1170: note = source = /note="Description of Artificial Sequence: Synthetic coding sequence"
  source 1..1170: mol_type = other DNA
atgaacggaacccgcaattggtgtaccctcgtggatgtccacccagaagatcaagcagcggggtcggtggatatactgaggcttacgctgcagggagaactcactggcgatgagctggaacatattgcgcaaaaggccggaaggaaaacctacgcaatggtgtcatcccattcagctggccactctcttgcatccgaactggtggaaagccacgacgggcatgaagagatcatcaaagtgtatctcaaaggaagatcgggggataagatgatccatgagaagaatatcaatcagctgaagagcgaagtccagtacatacaagaggcacgtaattgtctgcaaaagctcagagaggatatctcgtcgaaactcgaccggaacttgggtgacagcctgcaccggcaggagattcaggtcgtgctcgaaaaaccaaacggtttctcccagtcccctactgctctgtacagcagccctcccgaggtggatacctgtatcaacgaggatgtggaatcactccggaaaactgtgcaagatctcctcgcaaagctgcaagaagcaaaacggcagcatcagtccgattgtgttgcatttgaagtgactctgtcaaggtaccagcgggaggccgagcagtccaacgtcgcgctgcaaagggaggaggacagggtggagcaaaaggaggcagaagtcggtgaactgcaacgtcgtttgcttgggatggaaactgaacaccaagcattgcttgccaaggtgagagagggagaagtcgcattggaggaactgagaagcaacaacgccgattgccaagcagaacgcgaaaaagcagcaacccttgaaaaagaggtggcgggtttgcgtgaaaagatccatcatctggacgacatgcttaagtcgcagcaacgcaaggttagacaaatgattgagcaattgcagaactcgaaggctgtgatacagtcgaaagacgcaacgattcaagaactcaaggagaagattgcctaccttgaggccgaaaatcttgagatgcatgaccgtatggaacatcttattgagaagcagataagccacggcaacttttcgacccaagctcgggcaaagaccgaaaatcctgggtcaatccgaatttccaaaccccctagcccaaaacccatgcctgtcattcgcgtggtggaaact

SEQ ID NO: 20361 - DNA, 1170 bp, synthetic construct
  misc_feature 1..1170: note = source = /note="Description of Artificial Sequence: Synthetic coding sequence"
  source 1..1170: mol_type = other DNA
atgaacgggaccaggaactggtgcactctggttgatgtccatccggaagatcaagccgcagggtcagtggatatcctccgcctgaccttgcagggagaacttactggagatgaattggaacatatcgcgcagaaggccggcagaaagacttacgccatggtgagcagccatagcgctggccattccctggcgtcggagctcgtggaatcacatgacggccatgaggagatcattaaggtgtatctcaagggacgctcaggagacaaaatgatccacgaaaagaacatcaatcagcttaagagcgaggtgcagtatatccaggaggcgcggaattgtctccagaaactgagggaggacatctcatccaaacttgaccgcaacctgggggactcccttcacagacaggaaatccaagtggtgttggaaaagccgaacggcttctcgcaaagcccgaccgctctctacagctcgccgccggaggtcgacacgtgcatcaacgaggacgtggaatcactccggaaaaccgtgcaggatttgctggctaagctccaggaggctaagcggcagcatcagtccgactgcgtcgccttcgaggtgaccttgtcacggtaccagagggaggcagagcaatcgaacgtcgccctccagcgggaggaggaccgcgtggaacagaaggaggccgaggtgggcgaactgcaaagacggctgctcggcatggagacggagcaccaggctctgctcgctaaggtcagagaaggagaggtggctctggaggagttgcgctcgaacaatgcggactgccaagcggagagagaaaaggccgcgactcttgaaaaggaggtggccggactgcgcgaaaagatccaccatctcgatgatatgctgaagtcccagcagcgcaaagtgagacagatgatcgaacaactccaaaactcaaaggcggttatacaatcgaaggatgccactatccaggaactgaaggaaaagatcgcctacctggaggcagagaatctcgaaatgcatgatcggatggaacatctgatcgagaagcaaatcagccacggaaacttttcgacccaggccagggccaagactgagaatccaggatcgatccggatctcaaaaccccccagcccaaagcctatgccggtcatccgggtggtcgagacg

SEQ ID NO: 20362 - DNA, 1170 bp, synthetic construct
  misc_feature 1..1170: note = source = /note="Description of Artificial Sequence: Synthetic coding sequence"
  source 1..1170: mol_type = other DNA
atgaacggaacgaggaactggtgcacactggtggacgtgcaccctgaagaccaggctgcgggatctgtggacatcctgaggctgacccttcagggtgaactgaccggcgatgaactcgaacacatagctcagaaggccggccggaaaacttatgcgatggttagctcacactcagccggccactctctggcttccgagctggttgagagccacgatggccacgaggagatcatcaaagtgtatttaaagggccgcagcggagataagatgattcatgagaagaacatcaatcagttaaagtccgaagtgcagtacatccaggaggcgaggaattgtttgcagaaacttcgggaagatatttcttccaaactggatcggaacctgggcgatagcctgcacaggcaagagattcaagtggttcttgagaagcccaacgggttcagccagagccccacagccctgtattccagtccgcccgaggttgacacctgcatcaacgaagatgttgagagtttgaggaaaacagtgcaggatttgctggcaaaacttcaggaggctaagaggcagcaccagtcagattgcgtggcgttcgaggtcaccctgtctcgataccaacgggaggctgagcagtccaacgtggcgttgcagagggaggaagatcgcgtggagcagaaagaggccgaggtgggcgaactgcaacgcagactgctgggcatggagacggaacatcaggccttactcgctaaggtgagggaaggggaggttgccctcgaggagctgaggtcaaataatgccgattgccaggccgagcgagaaaaagccgccactctggaaaaggaagtggccggtttgcgggaaaagatccaccacttggatgatatgctgaagtcccagcagcggaaggtgcggcagatgattgagcaattgcagaactctaaagccgttatccagtctaaggatgccacaattcaagaactgaaggagaagatcgcctatctggaagctgaaaaccttgaaatgcatgaccgtatggagcatttaatcgaaaaacagatctcccatggtaatttctcgacccaggctcgcgcaaaaacggagaacccagggtcaatcaggatatctaagcctccatctccaaaacccatgcccgtaattcgggttgtggaaacc

SEQ ID NO: 20363 - DNA, 1170 bp, synthetic construct
  misc_feature 1..1170: note = source = /note="Description of Artificial Sequence: Synthetic coding sequence"
  source 1..1170: mol_type = other DNA
atgaacggaactaggaattggtgtactctggtggatgtgcatccagaagatcaagctgcagggtctgtcgacattctgagactgaccctccagggtgagctgaccggagacgaactggaacacattgcgcaaaaggccggacgtaaaacgtacgccatggtgtcgtcacattccgccggacacagtctggcctctgaacttgtggaatcccacgatggccacgaagagatcatcaaagtctacctcaaaggcagaagcggagataagatgatccatgagaagaacattaaccagctgaaaagcgaggttcagtacatccaggaagcaagaaattgcctccagaaactcagggaggacatctcgtccaagctcgaccgcaatctgggtgactcccttcaccggcaggaaatccaggtggttctcgagaagccgaatggattttctcagtccccaaccgccctgtattcgtcgccacctgaggtggatacttgtatcaacgaggacgtcgagagcctgcggaaaactgtgcaggatctcttggctaaactccaggaggcgaagcggcagcatcaatcggattgcgtggccttcgaggtgacgctgtccaggtaccagagggaggctgaacaatccaatgtagctctgcaacgggaggaagatcgcgtggaacagaaggaagcagaagtcggagagttgcagcgacggctcctgggaatggaaaccgagcaccaggcactcttggcaaaggttcgcgaaggagaggtggctctcgaggaacttcgcagcaacaacgctgattgccaagccgaaagagaaaaggccgcgactctcgaaaaagaggtggccggactgagggaaaagatccaccaccttgacgacatgctcaaatcccaacaacgcaaggtccgccaaatgatcgaacagctgcagaacagcaaagccgtcatccaatcaaaggacgcaactatccaggagctgaaagagaagatagcttacctggaagccgagaatcttgaaatgcacgataggatggaacatcttatcgaaaagcaaatctcccatggaaacttcagcacccaagcaagagcaaagaccgaaaacccaggatcaatcaggatctccaagccgccatcaccaaagccgatgccggtgattcgcgtggtggaaacc

SEQ ID NO: 20364 - DNA, 1170 bp, synthetic construct
  misc_feature 1..1170: note = source = /note="Description of Artificial Sequence: Synthetic coding sequence"
  source 1..1170: mol_type = other DNA
atgaacggcacaaggaattggtgcactctagtcgacgtgcatccagaggaccaggccgccggctctgtggatatcctgaggctgacgcttcagggcgagctcacaggagatgagctcgagcatatcgcccaaaaagctgggcgaaaaacatacgcaatggtctcttcccactctgcgggccattcccttgcgagtgagctggttgagtcacacgacgggcatgaggaaatcattaaagtgtacttgaagggtcgctccggggataaaatgattcatgaaaagaacatcaatcagttaaagtcagaggtccaatatatccaggaagccaggaactgtctgcagaagctacgcgaggacatttcctcaaaactggacagaaaccttggtgacagtctccacagacaggagattcaggtggttctggagaaaccaaatgggtttagtcaatcacctactgctctttattccagcccaccagaggtggacacctgtatcaacgaagatgtcgaatcactccgaaaaacagtgcaggatctgctcgccaaattgcaggaggctaaaagacaacatcaatctgactgtgtcgcctttgaggtgacactctctaggtatcagcgggaagccgaacaatccaacgtcgcgctgcagagagaggaagacagagtggagcaaaaagaggcagaggtcggagaacttcagagaagattgttggggatggaaactgagcaccaggctctgctggcaaaagtgcgagagggtgaggtggcccttgaggagcttcggagcaacaacgcggattgccaggcagagcgcgagaaagctgctaccttagaaaaagaagtagcaggcctgagggaaaagattcaccatctcgacgatatgttaaagagccagcagcgtaaagtgcgacaaatgatagaacagcttcagaactccaaagcagttatccagagtaaggacgcaaccatccaagagctaaaagagaaaatcgcctatctcgaggccgagaacttggagatgcatgaccggatggagcacctgatcgagaagcaaatttctcacgggaacttctcaacccaggcacgggctaagactgagaaccctgggagcatcaggataagcaaaccccccagtcccaagccaatgccggtgattagagttgtagagaca

SEQ ID NO: 20365 - DNA, 1170 bp, synthetic construct
  misc_feature 1..1170: note = source = /note="Description of Artificial Sequence: Synthetic coding sequence"
  source 1..1170: mol_type = other DNA
atgaacggcacgcgcaactggtgtacacttgtggacgtccaccccgaggaccaagccgccggaagcgtcgatatcttgaggttgacgttgcaaggggagctgaccggcgacgaacttgagcatattgctcagaaagctggcaggaagacttatgctatggtgtcctcacactccgccggacatagcctggcttctgaactggttgaaagccatgatggccacgaggagataatcaaggtctacctgaaggggcgcagcggcgataagatgatccacgagaagaatatcaaccaactcaagtctgaggtgcagtatatccaagaagcccgcaattgcctgcagaaactccgggaggacatttcctcgaagctggatcgcaatctcggcgactctttacatagacaggagatacaagtcgtgctggaaaagccaaacggcttctcccagtccccgactgccctgtattcatcccctccggaggtggacacatgtataaatgaggatgtggaatcattgcggaaaactgtacaagatctccttgctaaattgcaggaagcaaaacgacagcaccagagcgactgtgtggccttcgaagtgaccctgtcaagataccagagagaagctgagcagagcaacgtcgccctgcagcgcgaagaagaccgcgtggaacaaaaggaagccgaagttggagaactccagcgcaggctcctgggaatggagaccgaacaccaggccttgctggctaaagtccgggaaggagaggttgctttagaggaattgagatccaataatgctgattgtcaagcagagagggagaaggctgctacacttgagaaagaggtagctggtctgagggagaagatccaccacttggatgacatgctgaagagtcaacagcgaaaagtccgtcaaatgatcgaacagttgcaaaactccaaagcagtgattcagagcaaggatgctaccatacaggagttgaaggagaagatagcgtatctagaggccgagaacttggagatgcatgaccggatggaacatctaatcgagaaacaaatttctcatggaaatttttcaacacaggccagagccaagaccgaaaacccggggtcaatcaggatctctaagcctccatctcctaaacccatgccggtgatcagggtggtcgagaca

SEQ ID NO: 20366 - DNA, 1170 bp, synthetic construct
  misc_feature 1..1170: note = source = /note="Description of Artificial Sequence: Synthetic coding sequence"
  source 1..1170: mol_type = other DNA
atgaatgggactcgcaattggtgcacgctagtagatgtgcatcccgaggatcaggctgcgggctccgtggacatcctgaggttaacactgcagggtgagctgaccggggatgagctcgagcacatagcccaaaaagcaggacggaaaacgtatgccatggttagcagtcattccgctggacactctttggccagtgaactggtggaatcccatgatgggcacgaggagattatcaaggtctacctcaaaggccggagtggggacaagatgatacatgaaaagaatattaaccaactgaagagcgaggtccagtacatccaggaagcacggaactgtctacaaaaactgcgtgaggacatatccagcaagctggacaggaatcttggagattctctccataggcaagagatccaggtggtgctagagaaaccaaatggtttcagccagtcccccacagccctgtattctagcccgcccgaagttgatacctgcatcaacgaagacgtggaatctctccgcaaaactgttcaggacctgctcgcaaagttgcaggaggctaagaggcagcaccagtctgactgcgtggctttcgaagtcacgcttagcaggtatcagagggaggctgaacaaagtaatgtggcactgcagcgggaggaggaccgggttgaacagaaggaggccgaagtgggcgaactgcagagaagactgttagggatggagacagagcaccaagccctccttgccaaagttcgagaaggagaggtggcgctggaggagctgagatccaataacgcagactgccaagcagagagagagaaagcagcaacgcttgaaaaagaagtggccggattgcgagaaaaaatacaccatctggacgatatgctgaagagccagcagagaaaagtgcgacagatgattgaacagctacagaattcgaaagctgtgatccaatccaaagacgccactatccaggaactgaaagagaagatcgcctacctagaggccgagaacctggaaatgcatgaccggatggaacacctgatagaaaagcagattagtcatggcaattttagtacccaggcgcgggccaagaccgaaaatcctggctctattaggatcagcaagcccccctcccctaagcctatgcctgtgattagggtcgtcgaaaca

SEQ ID NO: 20367 - DNA, 1170 bp, synthetic construct
  misc_feature 1..1170: note = source = /note="Description of Artificial Sequence: Synthetic coding sequence"
  source 1..1170: mol_type = other DNA
atgaacggaacccggaattggtgtaccctggtggacgtgcaccctgaagatcaagcagcgggctccgtcgacattctccggctgactcttcagggggagctgaccggagacgagctggagcacatcgcgcagaaggccgggcgaaaaacttacgcgatggtgtcctcgcatagcgcaggccactcattggcgtccgaacttgtcgaaagccatgatggccatgaagagatcattaaggtgtacttgaaaggacgatcgggggataagatgatacatgaaaagaacataaatcagctgaagtcggaagtgcagtatatccaagaagcacgaaactgccttcaaaaactgcgggaagatatctcctcgaagctggatagaaaccttggagactcccttcaccggcaagagattcaagtggtgctcgaaaagccaaacggtttttcgcagtccccaactgctctgtactcatccccgccagaggtggatacttgcataaatgaggacgtcgaatcccttagaaagaccgtccaggatctgttggccaaacttcaagaggctaaacgccagcatcaaagcgattgtgtggcattcgaagtgactctgtctaggtaccaaagggaggctgagcaatccaacgtagcactccaacgcgaagaggatcgtgtggagcagaaggaagcagaggtcggtgaattgcagagacgtctgttgggaatggaaaccgaacatcaagccctcctggcaaaggtgagagaaggggaggtggcactggaagagttgagatcaaacaacgcagactgtcaagccgaacgagaaaaggcagcaacgctcgagaaggaagtggcaggcctcagggaaaagatacaccatctcgacgatatgttgaagtcgcaacagcgaaaagtgcggcaaatgatcgagcaactgcaaaattcaaaagcagtgatacagtcaaaggatgccactatccaggaactcaaggaaaagattgcatacttggaagcagagaatctggagatgcacgatcgaatggagcatctgattgagaaacagattagccatggaaacttttccacccaggcaagggcgaaaaccgaaaatcccggcagcatcagaattagcaagcctccttctcctaaacctatgcccgtcattcgagtcgtcgaaacc

SEQ ID NO: 20368 - DNA, 1170 bp, synthetic construct
  misc_feature 1..1170: note = source = /note="Description of Artificial Sequence: Synthetic coding sequence"
  source 1..1170: mol_type = other DNA
atgaacgggacgcgcaattggtgtactctggtggacgtgcatccagaagaccaggccgctggcagcgttgacattttgaggctgactttacagggcgagctcacgggcgacgagctcgaacacatcgcacagaaagcaggtaggaagacctatgctatggtaagttcacactctgccgggcacagtctggcctcagagctggtggagtcccatgacggtcacgaagagatcatcaaggtctacctgaaaggccgatcaggagataaaatgattcatgaaaagaatatcaaccagctgaaatctgaagtgcagtacattcaggaagcccgaaattgcctgcagaaactgcgagaagatatcagttccaaactcgacaggaatctgggcgattctttgcatagacaggagattcaggtggtgcttgagaagcctaacggattttcccagagccccactgccctttacagctcgccgcctgaggtcgatacatgcattaatgaagacgtggagtccctcaggaagacagttcaagacctgttagctaagctccaagaggcgaaaaggcagcaccagagtgactgcgtggcatttgaggttactctatctcgctatcagcgtgaagctgagcagtccaacgtggccttgcagcgggaggaggacagggtcgaacagaaagaggccgaggtcggagaactacagagacggcttctcggtatggagacagaacaccaggcactgctggctaaggtacgtgagggtgaggttgctctggaggagctaaggagtaacaacgccgactgtcaggccgaacgcgagaaggctgccacattagagaaagaagtggccggcctgcgagagaagattcatcaccttgacgacatgttgaagtcccagcagcggaaggtgagacaaatgatagagcagctgcagaactctaaagccgtgatacagagtaaagacgcgacaatccaggaattaaaggagaagatagcctatctagaagccgaaaatctggaaatgcacgataggatggagcatttgatcgagaaacagattagccacggtaacttttcaacccaggctagggctaaaacagaaaatccgggctcaattcgcatctccaagccccctagtcccaagccaatgccggttattcgggtggtggagaca

SEQ ID NO: 20369 - DNA, 1170 bp, synthetic construct
  misc_feature 1..1170: note = source = /note="Description of Artificial Sequence: Synthetic coding sequence"
  source 1..1170: mol_type = other DNA
atgaacggaactcgcaactggtgcaccctcgtggacgtgcacccggaggaccaagctgcaggcagcgtggatattctgagactgacgctgcaaggcgaactgacgggggacgaactcgagcatatcgcacagaaggcggggcggaaaacttatgctatggtgtcatcacactcggccgggcactccctcgcctccgaactcgtcgaaagccacgatggacacgaagaaatcatcaaagtttatctgaagggccggtccggcgataagatgatccatgaaaagaacatcaaccaactgaagtcggaggttcagtacattcaggaggcccgcaactgtctccagaaacttcgggaagatatctcatcgaagctggatagaaatctgggagactcgctccaccggcaggaaatccaggtggtgcttgaaaagccgaatggattttcgcaatcccctaccgcactgtactcctcgcccccggaggtggacacctgcatcaacgaggacgtggagagcttgagaaagactgtgcaggaccttctcgccaagctccaagaagcaaaacggcagcatcagagcgactgtgtggcgttcgaagtcaccttgtccagataccaacgcgaggccgagcaatcgaacgtggcccttcagcgggaagaggatcgcgtcgaacaaaaggaagccgaagtcggggaactgcagcggcgactgctgggaatggaaaccgagcatcaggcgctgctggccaaggttagagaaggagaggtggctctggaagagctcaggtccaataatgcagattgtcaagccgaacgcgagaaggcagccactttggaaaaggaggtcgcaggactgcgcgagaaaattcaccacctcgacgacatgctcaagagccagcagcgcaaggtgaggcagatgattgagcagctgcagaattcgaaggccgtgatccagtctaaagatgcaacgatccaagaattgaaggagaagatcgcctatctggaggcggagaatctggagatgcatgacaggatggaacatctgatcgaaaagcaaatctcccacggaaacttctctacccaggcgcgcgccaaaaccgaaaacccaggaagcatcagaatctcgaagcctccatctccgaaaccaatgccggtcatccgcgtcgtcgaaact

SEQ ID NO: 20370 - DNA, 1170 bp, synthetic construct
  misc_feature 1..1170: note = source = /note="Description of Artificial Sequence: Synthetic coding sequence"
  source 1..1170: mol_type = other DNA
atgaatgggacacgcaattggtgcacgttggtagatgtgcaccctgaagatcaggccgctggaagcgtcgatatattgcggctgacgctgcaaggtgaactcaccggcgatgagctcgagcacattgcgcagaaggctggacgcaaaacttacgcaatggtgtcctcacattctgctggccactctctggcttctgagttggttgagagccacgacggtcacgaggagatcatcaaggtgtatctcaagggacgcagtggcgacaaaatgattcatgagaaaaacataaaccaactgaaaagtgaagtgcagtatatccaagaggcaaggaattgtttgcagaagctgcgggaagacatctcatctaagctggaccggaacctgggggattcccttcacaggcaggaaatccaggtggtccttgaaaaaccaaacggattctcacagagtccaacagcactgtactcctccccacctgaagttgacacttgcattaacgaagatgtcgaatccttgcggaaaactgtacaggatcttctcgccaagctgcaggaagctaagagacagcaccagtctgactgtgtcgcatttgaggtcactctgagtcgatatcaaagagaagctgaacagtccaacgtggctctccagagagaggaagaccgagtcgagcagaaggaagccgaagttggcgagttgcaaaggagactgttgggcatggaaaccgaacatcaggccctgcttgccaaggtgagagagggtgaggtggcacttgaggagcttcgaagcaacaacgcagactgtcaggccgagagggagaaggcagcaactctggagaaggaggtggccggccttcgggaaaaaatccatcacctggatgacatgctgaaatctcagcaacgaaaagtgaggcagatgatagaacagctccagaactcaaaggctgtcatccagtctaaagacgccaccatacaggaattgaaagagaagatcgcttatctggaggccgaaaatctggaaatgcacgatcggatggagcatttgatcgaaaaacagatcagccacggcaactttagcacgcaggctagagcaaaaactgaaaatccaggatccatcaggatttctaaaccgcctagcccaaagccgatgcctgttatccgcgttgtcgagact

SEQ ID NO: 20371 - DNA, 1170 bp, synthetic construct
  misc_feature 1..1170: note = source = /note="Description of Artificial Sequence: Synthetic coding sequence"
  source 1..1170: mol_type = other DNA
atgaacggaactagaaactggtgtaccctcgttgacgtgcacccggaagatcaggcggcgggaagcgtggacatcctgagactgactctccaaggtgaactgactggagacgagctggaacacatcgcccaaaaagcgggccgcaaaacctacgctatggtatcgtcgcactcggctggccactcccttgcatccgagctcgtcgaatcacatgacggccatgaagaaatcatcaaggtgtacctgaagggaagatccggagacaaaatgatccatgaaaagaacatcaatcaactgaaaagcgaagttcagtacattcaggaggcccgcaattgcctgcaaaagctccgggaagacatctcatccaagctggatcgcaacctcggcgactccctccaccgccaagaaattcaggtcgtgttggagaaacccaacggattctcccagagcccgaccgccctctactcgagcccgcctgaggtggatacctgcatcaacgaggatgtggagagcctgcgcaaaacggtccaagatctgctggccaaactgcaagaagctaaacgccagcatcagtcggactgcgtggcgttcgaagtgaccctgtcccggtaccagagggaggcagaacagtcgaacgtggccctccaacgcgaagaagaccgggtggagcagaaggaagccgaagtgggagaactgcaacgccggttgttgggaatggaaaccgagcaccaggctctgttggcgaaggttcgcgagggagaggtcgccctggaagaactgcgctcaaacaacgcagattgtcaagcggagcgtgagaaggcagccacgctggagaaagaagtggccggattgcgcgaaaagatccatcacctggacgacatgctgaagtcccagcagagaaaagtccgccagatgatcgaacagctgcagaattcaaaagccgtgattcagtccaaggatgcgaccatccaggaactgaaggaaaagattgcttacctggaagcagagaacctggagatgcacgaccggatggagcatcttatcgaaaaacagatctcacacggaaacttcagcactcaggcaagagccaagaccgaaaaccccggctcgatccgcatcagcaagcccccgagccccaagccaatgccagtgatcagagtggtcgaaact

SEQ ID NO: 20372 - DNA, 1170 bp, synthetic construct
  misc_feature 1..1170: note = source = /note="Description of Artificial Sequence: Synthetic coding sequence"
  source 1..1170: mol_type = other DNA
atgaatggaacgagaaattggtgtactcttgtcgacgtgcatcctgaggatcaagcagccggctcggtggatatcctcaggctgactctgcagggtgaactgaccggagatgagctggaacacatcgcacagaaggccggccgcaagacgtacgcaatggtgtctagtcactcagcaggccattccctggcatcggaacttgtggaatcacacgatggacacgaggagatcattaaggtgtaccttaaaggacgaagcggagacaagatgattcatgagaagaacattaaccagctcaagagcgaagtccaatacatccaagaggcccgtaactgtctccagaagttgagggaagatatttcatccaaacttgaccgtaaccttggagactcgcttcatcggcaagagattcaagtggtcctggaaaaaccaaacggattttcccaaagccctaccgccttgtactccagcccgcccgaggttgatacctgtattaacgaggacgtggagtcactgcgcaaaaccgtccaagatctgcttgcgaagctgcaggaagccaaaaggcagcatcagtcagattgtgtcgcatttgaagtgacgttgtcccggtaccaacgcgaggccgagcagtctaacgtggcattgcagagagaagaggaccgcgtcgaacagaaagaggcagaagtgggcgagcttcaacgtaggctgctggggatggaaaccgaacaccaagcactcctggccaaggttcgggagggggaagtcgcactggaagaactgcgttcgaacaacgcggattgtcaagccgagagagagaaagcggcaaccctcgaaaaagaagtcgctggccttcgggaaaagatacaccatctggatgacatgcttaaaagccaacagagaaaagtcaggcagatgattgagcaactccagaattcgaaggcagtgatccaaagcaaagatgcaaccatccaagaactcaaggaaaagatcgcataccttgaagcagagaaccttgaaatgcatgacagaatggaacatttgattgaaaaacaaatttctcatgggaactttagcactcaggccagagccaaaactgagaatcccggatccattagaatctccaaaccaccaagccctaagcctatgcctgtgatccgcgtcgtggagacg

SEQ ID NO: 20373 - DNA, 1170 bp, synthetic construct
  misc_feature 1..1170: note = source = /note="Description of Artificial Sequence: Synthetic coding sequence"
  source 1..1170: mol_type = other DNA
atgaacggcaccaggaactggtgtacccttgttgatgttcatccagaggaccaagctgctggatcggtggatattctgagacttactttgcaaggtgaactcactggtgatgaacttgagcacatagctcaaaaagccggtaggaagacatacgcaatggtttcttctcattcagcaggacactctttggcttctgagttggttgagtctcacgatggccatgaagagataataaaggtatatctgaaggggcgctcaggtgacaaaatgattcacgagaagaacatcaatcaattgaagtcagaagtgcaatatatacaggaagcaaggaactgcttgcaaaagcttcgagaagatatttcatcgaagcttgatcgtaatctgggagactccctccatcgccaagaaattcaagttgttcttgaaaagccaaatggattctcacaatctcctacggctttgtacagttcacctcccgaggttgacacttgtatcaatgaggacgtcgaatcccttaggaagactgttcaagatcttttggctaagttgcaggaagcaaaacgtcagcaccagtctgattgcgtagcattcgaagttactttgtcaagataccaaagggaagccgagcagtcaaacgttgcacttcagcgtgaggaagatcgcgtagagcaaaaggaagcagaagttggagaattgcaacgaaggttgctaggaatggagactgagcaccaagctcttttggctaaagtccgtgagggcgaagttgccctggaggagcttcggtcaaataatgctgactgccaggctgagcgagaaaaggctgctacccttgaaaaggaggtagccggacttagggaaaaaattcatcatttggatgacatgctcaagtcacagcagagaaaagttagacagatgattgaacaattacaaaattcaaaggcagtgatccaatccaaggatgccacaattcaagaattgaaggagaaaatcgcttatctcgaagcagagaatttggagatgcatgacagaatggaacacttaattgaaaaacaaatctctcacggaaacttttcaacacaggcccgcgctaagactgaaaaccccgggtctattcgtatatctaagccacctagtcccaaaccaatgccagttattcgtgtggtggaaaca

SEQ ID NO: 20374 - DNA, 1170 bp, synthetic construct
  misc_feature 1..1170: note = source = /note="Description of Artificial Sequence: Synthetic coding sequence"
  source 1..1170: mol_type = other DNA
atgaacgggacaagaaactggtgtaccctggtcgatgtgcatcccgaggaccaagccgcgggtagcgtggacattcttcggcttacgttgcagggcgagcttacaggggacgagctggaacatattgcacagaaggcaggcaggaaaacctacgcaatggtcagcagtcatagcgccggtcactctcttgcctcagaactcgtcgagagtcacgatgggcacgaagaaattattaaggtttatctgaagggccggtctggcgacaagatgattcatgagaagaacatcaaccagctcaaaagcgaggtgcagtacatccaggaagcacggaactgcctgcagaaactgcgcgaagacatctcatctaaattggaccggaatctcggcgatagcttgcaccgccaggaaattcaggtagtcctggagaagcctaacgggttctctcagagccccaccgctctgtattcttcccctccggaggttgacacatgcattaatgaggatgtcgaaagtctgagaaagacggtgcaggatctgctcgccaaactgcaggaagcgaagagacagcatcagtccgactgcgtggcgtttgaggtaactctgagccggtatcagagagaggcggaacaaagcaatgtggccctgcagcgcgaggaggacagagtcgagcagaaggaagcagaggtcggggagctccagcgcaggctgctgggcatggagacagagcatcaggccctcctggccaaagtcagggagggggaggtggccctcgaggagcttcgctctaataacgcggactgccaagccgaacgcgaaaaggcggcaacactcgaaaaggaagtcgctgggctcagggaaaaaattcaccatttggatgatatgctgaagtctcaacaaagaaaggtcaggcagatgatagaacagcttcagaatagtaaggccgttatccagagcaaggacgccaccatccaggaactgaaggaaaagatcgcttaccttgaagcggaaaatctcgaaatgcacgatcggatggaacacttgatcgaaaaacagatttctcacggcaatttcagcactcaggctcgcgctaaaactgaaaatcccggttccatccggatcagtaagccaccaagcccgaagccaatgcccgtcatacgcgtggtggagacc

SEQ ID NO: 20375 - DNA, 1170 bp, synthetic construct
  misc_feature 1..1170: note = source = /note="Description of Artificial Sequence: Synthetic coding sequence"
  source 1..1170: mol_type = other DNA
atgaacggaactaggaactggtgtactcttgtcgatgtgcacccggaggaccaagccgcggggtcggtggatatcctcaggctgaccctccaaggtgaacttaccggtgatgagttggagcatatagcacaaaaggctggacggaaaacctacgcaatggtatcttctcattctgccggacatagcctcgcttcggaacttgtcgagtcgcatgatggtcacgaggagattatcaaggtgtacctcaagggaagatcgggggataagatgattcatgaaaagaacattaaccagctgaagtcggaggtgcagtacattcaagaagcccgaaattgccttcaaaagctgagggaagatatttcatcgaagctggatcgcaatcttggtgatagcctgcacaggcaggaaattcaggtggtgcttgaaaaacccaacggcttttcacagtcgcccacggcactgtactcatcgccacctgaggtcgacacctgcattaatgaggatgtggagtcgcttcgaaagaccgtccaagatctgcttgcaaaactgcaggaagccaagcgacagcatcagtccgattgcgtggcctttgaagtgactctgagcaggtaccagagagaagcagaacaaagcaatgtcgctcttcagcgggaggaggaccgtgtggaacaaaaggaagcagaagtgggtgaacttcaaagaaggctgctcggaatggaaaccgaacatcaagcactgctcgcaaaggtccgtgaaggagaagtcgcgctggaagaacttcgttcgaataacgcagactgtcaggcagaaagagaaaaggctgccacgctggaaaaggaagtcgcgggactgagagaaaagattcaccatctggacgatatgcttaaaagtcaacaaaggaaggtgcggcaaatgatcgagcaactgcaaaattccaaagcagtgatccagagcaaggatgcaactattcaagaactcaaagaaaagatcgcataccttgaggccgagaaccttgaaatgcatgatcgtatggaacaccttattgaaaagcaaatctctcacggaaacttctcaacccaggcacgagcaaagaccgaaaaccctgggtcgattcgcatctccaaaccaccttcgcctaagcctatgcccgtcattcgcgtcgtggaaacc

SEQ ID NO: 20376 - DNA, 1170 bp, synthetic construct
  misc_feature 1..1170: note = source = /note="Description of Artificial Sequence: Synthetic coding sequence"
  source 1..1170: mol_type = other DNA
atgaacggcactcgtaattggtgtacactggtcgacgtacaccccgaggatcaggcggcgggttccgtcgatattctgcggctgacactccaaggagagctgacgggcgatgagcttgagcacattgcccagaaggctggccgtaagacctacgcaatggtgtcatcccatagcgctggccactcgttagccagtgagcttgttgagagccacgacggtcacgaggagatcattaaggtttacctgaagggtcgtagcggtgataagatgatccacgaaaagaacattaaccagttgaaaagcgaggtccagtacatccaggaggctcggaactgtctgcaaaagcttcgcgaggacatttccagcaagctggatcgaaacctcggagactctctgcaccgccaagagattcaggttgtcctggagaagcccaacggcttttcccagagccctacggcgctgtatagcagcccccccgaggtcgatacgtgcatcaacgaagacgtcgagtccctgcggaagaccgttcaagatttgttggcgaagctccaggaggccaagcgccagcaccagtcggactgcgtcgcgtttgaagtgaccctgtctcgttatcagcgtgaagctgagcagtccaatgttgccctccagcgcgaggaggaccgagtagagcagaaggaggcagaggtgggtgagcttcagcgtcgtcttcttggcatggagactgagcaccaggccctgttggcgaaggtccgggaaggggaagtagccctggaagagctacgctctaacaacgccgattgtcaggccgagcgcgagaaggctgctaccctagaaaaggaagtggccggtctccgggagaagattcaccacctggacgatatgcttaagagccagcagcgcaaggtcaggcaaatgatcgaacagcttcagaactccaaagctgtcatccaatctaaggacgctaccattcaggagttgaaggaaaaaatcgcctacctggaggccgagaacctggagatgcacgaccgtatggaacacctgatcgaaaagcagatttcgcacggtaacttctcgacacaggcccgcgccaagacggagaaccccggctcgattcgaatctccaagcccccttcccctaagcccatgcccgtgattcgggttgtagagacc

SEQ ID NO: 20377 - DNA, 1170 bp, synthetic construct
  misc_feature 1..1170: note = source = /note="Description of Artificial Sequence: Synthetic coding sequence"
  source 1..1170: mol_type = other DNA
atgaacgggacacgcaattggtgtacactggtggatgtgcaccctgaggatcaggccgctggctcagtagatattcttagattgacactgcaaggcgaattgacaggtgacgagctggagcacattgcccagaaagctggaagaaagacctacgcgatggtatctagccactcagccgggcacagcttggcgtccgaactggtcgaatcacatgatggacatgaagaaattatcaaagtgtacttgaaggggcggtctggcgataagatgattcacgagaaaaatatcaaccaactcaagtcagaagtgcagtatatccaggaagctcggaactgtcttcagaaactcagggaagatatttcaagcaagctggaccgcaacctcggtgattctctgcacagacaggagatccaggtggtcctggaaaagcccaacggtttctctcagtctccaacagccctgtattcaagccctcctgaggttgacacttgcattaatgaggacgtggagtccctgagaaagaccgtgcaggacctgcttgcaaagttgcaggaggctaaacgacagcaccaatctgactgtgtggcctttgaagtaaccctgtctaggtatcagcgtgaagctgagcagagtaacgtcgccttgcagcgggaggaagatcgcgtggagcaaaaagaagccgaagtgggagagcttcagcgacgccttctgggcatggaaaccgagcaccaggccctcttagcaaaggtgcgcgaaggcgaagtagccttggaagagctgaggagcaataacgccgattgccaagccgagcgcgagaaggcagccactctggagaaggaagtggctggacttcgcgaaaaaatacaccacctcgatgatatgcttaagtcccaacagcggaaagttagacagatgatcgaacaactgcagaatagcaaggctgtaatccagtctaaagacgccaccatccaggaactgaaagagaaaatagcttacttggaggccgaaaacctggagatgcatgaccgaatggaacaccttatcgagaagcagatttctcatggcaacttctctactcaggctagggcaaaaaccgagaatccaggatcgatcagaatatctaaacccccatctcccaaaccaatgcccgttatccgggtcgtggaaacc

SEQ ID NO: 20378 - DNA, 1170 bp, synthetic construct
  misc_feature 1..1170: note = source = /note="Description of Artificial Sequence: Synthetic coding sequence"
  source 1..1170: mol_type = other DNA
atgaacggaaccagaaactggtgcacactggttgacgtccatcccgaggaccaggccgctggtagcgtggatattctgaggctcacactgcagggtgaattgactggtgacgaacttgagcacatcgctcagaaggccggacgtaagacttacgcaatggtgtccagtcacagcgctggccacagtctggcttccgagctcgtagagtcacacgatggtcacgaggagatcattaaggtgtatctgaagggtcgctctggcgacaagatgatccacgaaaagaatataaatcagctgaagagcgaggtccagtatatccaggaggctaggaactgccttcagaagcttagagaagacatatcttctaagctggatagaaacctcggcgactccctccacaggcaagagatccaggttgtgctcgagaaacccaacggattctctcagtctcctacagctctgtactctagtcctcctgaagttgatacatgcattaacgaagacgtcgagtccctgaggaagacagtacaggaccttctggcaaagcttcaagaagcaaagagacaacatcagagcgactgtgtggcttttgaagtcacactctcaaggtaccaacgcgaggccgagcagagcaacgttgccctccagcgtgaagaggatagagtggagcagaaggaggctgaggttggagaactgcagagaaggctgcttggaatggagacagagcatcaggctctgctcgccaaggttcgtgagggagaagtcgccctcgaggagctgaggagtaacaatgcagattgtcaggcagagcgcgagaaagccgccacactcgagaaagaggttgctggactcagagagaaaatccatcaccttgacgacatgctgaagagccagcaaagaaaggtgaggcagatgattgaacagttgcagaactccaaggctgtcattcagagtaaagatgccaccatccaggagctgaaggaaaagatcgcttacctcgaggcagagaacctggagatgcacgaccgcatggagcacctgatcgaaaaacagattagtcatggtaactttagtacccaggctcgtgccaaaacagagaacccaggctccatacgtatttcaaagcctccaagcccaaagcctatgcctgttatacgtgtcgtggaaacc

SEQ ID NO: 20379 - DNA, 1170 bp, synthetic construct
  misc_feature 1..1170: note = source = /note="Description of Artificial Sequence: Synthetic coding sequence"
  source 1..1170: mol_type = other DNA
atgaacggaactcggaactggtgtacgctggtcgatgttcacccagaagatcaagcggcaggatctgtggacatcctccggctcactctgcaaggagagctcactggggatgagctcgaacacattgcacagaaagccggacgaaagacctacgcgatggtgtcatcccactcggccggacattcgctggcctcagagctggtagaatcccatgatggacacgaggaaatcatcaaggtttacctgaagggcagaagcggcgacaaaatgatccacgagaaaaacatcaaccagctgaagtcggaagtccagtacatccaggaggcacggaactgcctccagaagctgcgcgaggatatttcttcgaaacttgataggaacctgggcgattccctgcaccgccaggagatccaggtggtgctcgaaaagccaaacggattttcacagtcgccgactgccttgtactcatctcctcccgaggtggacacctgcatcaacgaggacgtcgaatcgctccggaaaactgtccaggatctgctggccaagttgcaggaagcgaagaggcagcatcagtccgactgtgtcgcgttcgaggtgactctgtcgagataccaaagggaggcagagcagagcaacgtggcgttgcagagagaagaagatcgcgtggaacaaaaagaagcagaagtgggcgagctgcagagaaggctcttgggaatggaaaccgaacatcaggccctcttggcaaaggtgcgggagggggaggtggccctggaggagctgcggagcaataacgccgactgccaagcagaacgcgaaaaggcggcaactctggagaaggaggtggccggtttgcgggaaaagatccaccacctggacgacatgcttaaatcgcaacagcgcaaggttaggcaaatgatcgagcaacttcaaaactccaaagccgtgattcagtccaaagatgccaccatccaggaacttaaggaaaagatcgcctacctggaggctgagaatttggagatgcatgatcgtatggaacacctgattgagaaacagatctcgcacggaaacttctcaacccaggcgagagccaagactgaaaacccgggaagcattcgcattagcaaacccccatccccgaagccgatgccagtgatccgggtggtcgagact

SEQ ID NO: 20380 - DNA, 1170 bp, synthetic construct
  misc_feature 1..1170: note = source = /note="Description of Artificial Sequence: Synthetic coding sequence"
  source 1..1170: mol_type = other DNA
atgaacgggacccgcaattggtgcaccctggtcgacgtgcacccggaggaccaggctgctgggtcggtcgatatcctgcgcctcaccctgcagggagaattgaccggagacgagctggagcacattgcccaaaaagctggtcgcaaaacctatgcgatggtcagctcgcattccgcgggccactcgctggcctcggaactcgtcgagtcccacgacgggcatgaagaaatcattaaggtgtacctcaaggggcgctcgggagacaagatgatccacgagaagaatatcaaccaactgaaatccgaggtgcagtacatccaggaagcaagaaactgtctgcagaaactcagagaggacatttcctcaaagctcgataggaatctcggagactcgctgcatcgccaggaaatccaagtggtgctggagaagccgaatggattcagccagtcccctactgctctgtattcctcacctccggaagttgacacttgtatcaacgaagatgtggagagcttgaggaaaactgtccaagatctgttggccaaactccaggaagccaagcggcagcatcaatcagattgcgtggcgttcgaagtgactctttcgcggtaccagcgcgaggcggaacagagcaacgttgcactccaacgcgaggaggacagagtggagcaaaaggaagccgaggtgggagagctgcagcgccgtctgctggggatggagactgagcatcaggctttgctcgcgaaagtccgggaaggagaagtggcactcgaggaactgcgctcaaataacgccgactgccaggccgaacgcgaaaaggcagccacgctggagaaggaagtggcgggactcagggagaagatccaccatctggacgacatgctgaagtcccagcagcggaaggtccgacagatgatcgaacaactgcagaactcgaaagccgtgatccagtccaaagacgccaccatccaggagctgaaggagaaaatcgcctacctcgaagccgagaacctggaaatgcacgatagaatggaacacctgatcgagaagcagatctcgcacggcaacttcagcacccaagcgagagccaagaccgagaatcccggatccatccgcatctccaaacctccgagcccaaaaccgatgccggtcatcagagtcgttgagact

SEQ ID NO: 20381 - DNA, 1170 bp, synthetic construct
  misc_feature 1..1170: note = source = /note="Description of Artificial Sequence: Synthetic coding sequence"
  source 1..1170: mol_type = other DNA
atgaacggcacgagaaactggtgcaccctggtcgacgtccacccagaagatcaggcagcggggagtgttgacatcctgagactgaccctgcaaggcgagctgaccggggacgagctggagcacatcgcacagaaagccgggcgaaagacttacgctatggttagctcgcactcggcaggtcatagcctggcgtcagagctcgtcgaaagccatgacgggcacgaggaaatcattaaggtgtacctcaaaggacggtccggcgataagatgatccacgaaaagaatatcaatcaactgaagtcggaagttcagtacatccaggaagcgcgtaattgtctgcaaaagctgagagaagatattagctcaaagctcgacagaaacctcggagattcacttcatcggcaggagatccaggtcgtgctcgaaaaaccaaacggattctcccagagcccgactgctctctactcgtccccgccagaggtggacacgtgcatcaacgaagatgtcgagtcattgaggaaaacggtccaggatctcctggcaaagctgcaggaggccaagcggcagcaccagtctgattgcgtggcatttgaggtcacgttgagccgctaccaaagagaagcggaacagagcaatgtggcgctgcagagagaagaagatcgcgtcgaacaaaaggaagcagaagtgggagaattgcagaggcgcctgctgggaatggagactgaacaccaagcactcttggccaaggtgcgggaaggagaggtcgcactcgaggaactccggtccaacaacgccgattgtcaggctgagcgcgaaaaagccgcgaccctggaaaaggaggtcgcaggactgcgggagaagatccatcatttggatgacatgcttaaatcccaacagcggaaggtcagacagatgatcgaacagttgcaaaactcgaaggccgtcatccaatcgaaagacgcgactatccaggaactgaaagaaaagatcgcgtacctggaagcagaaaatctcgagatgcatgacagaatggaacatctgattgaaaagcagatttcacacggcaatttctcaactcaagcgcgcgccaagaccgagaaccctgggtccatccggatatcgaagccgccaagcccaaagcccatgcctgtaatccgggtggtggaaacc

SEQ ID NO: 20382 - DNA, 1170 bp, synthetic construct
  misc_feature 1..1170: note = source = /note="Description of Artificial Sequence: Synthetic coding sequence"
  source 1..1170: mol_type = other DNA
atgaacggcactaggaactggtgcacactcgttgatgtgcaccctgaggatcaggctgcgggttccgtcgacattttgcgccttacattgcaaggggagctcactggggatgaactcgagcatatcgcgcagaaagccggtcgaaaaacatatgcaatggtaagcagccatagtgctgggcactcattggctagtgagctcgtcgaatcccatgacggacacgaggagattatcaaagtctacctgaaagggcgaagtggcgacaagatgatacatgagaaaaacatcaatcagctgaaatctgaggttcaatacatccaggaggcacggaactgccttcagaaactccgcgaggatattagctcaaagttggatcgaaacctcggggattctctgcacaggcaagaaatccaggtggtcttagagaaaccgaatgggtttagccaaagccccactgctttgtatagcagtcctcccgaggttgacacttgcatcaatgaggacgttgagagccttcggaaaacggtgcaggacctgctcgccaagctgcaggaggccaaacgacaacaccagagcgactgtgtggcctttgaggtgacactctctaggtaccagcgagaagctgagcaatcgaacgtggcccttcagcgagaagaggatcgcgtcgagcaaaaagaggctgaagtcggggagctgcagcgacggctgcttggaatggaaaccgaacatcaggctctgttggccaaggtgcgggagggcgaggttgccctcgaagagctgagaagtaataatgccgattgccaggcagagagggagaaggccgccacattggaaaaagaggtggcaggactgcgagagaagatccatcacttagatgatatgctcaaatcgcaacaaagaaaggtgaggcagatgatcgagcagttgcagaacagcaaagctgtgatccagtccaaggacgccaccattcaggagctgaaagaaaaaattgcataccttgaagctgaaaacctggagatgcatgatcgtatggaacacctgattgaaaaacagatttcccacggaaactttagcacgcaagcccgagcgaaaacagaaaaccccggatctattcgcatcagcaagcccccgtcacccaaacctatgcctgtgattcgtgtggtagaaacc

SEQ ID NO: 20383 - DNA, 1170 bp, synthetic construct
  misc_feature 1..1170: note = source = /note="Description of Artificial Sequence: Synthetic coding sequence"
  source 1..1170: mol_type = other DNA
atgaatggaacaaggaattggtgtacactggttgatgtacatcctgaagatcaggcagctgggtcggtggacatcctcaggttgactctccagggagagctcactggtgacgagcttgaacatattgcgcagaaggccggtcgcaaaacatacgccatggtttcaagccatagtgccggccacagcctggcctctgaattagtggagagccacgacggccacgaggaaatcatcaaagtttatcttaagggacgaagtggcgataaaatgatccatgaaaagaacatcaaccagctcaagagtgaggttcaatacattcaggaagcccgcaattgcctccagaagctgagggaggacatttcatcgaagctcgatagaaacctgggtgattcactgcatcgtcaggagatccaggtcgtactagagaagcccaatggattctctcagagcccaacagcattatacagtagcccaccagaagtggacacctgcatcaacgaagacgtcgaaagcctgaggaaaaccgtccaggatctgctcgctaagctccaggaagccaaaagacagcatcagtctgactgtgtggctttcgaagtaaccctgagccggtatcagcgagaagcagagcagagcaacgtggctcttcaaagagaagaggaccgtgtcgagcagaaggaggctgaggtcggggaactacagcggcggcttctgggcatggaaactgagcaccaggccttgctcgcaaaagtgcgggagggagaggttgctctcgaggagttgcgatctaacaacgccgactgccaagcggaaagagagaaggctgccactttggagaaggaggtggccggcctgcgtgagaaaattcatcatctcgatgatatgctgaagtcccagcagaggaaggttaggcagatgattgagcagctgcagaattctaaagcagtgatccagtcgaaggacgcaactatccaggagctgaaggaaaaaattgcctatctggaggcagagaatctagagatgcacgatcggatggaacacctaatcgagaaacaaatctctcatggaaacttttccacgcaagctagagcaaaaacggagaatcctggttcgattcgaatatccaagcctccatcccccaaaccaatgcctgtgatcagggtggtggagacg

SEQ ID NO: 20384 - DNA, 1170 bp, synthetic construct
  misc_feature 1..1170: note = source = /note="Description of Artificial Sequence: Synthetic coding sequence"
  source 1..1170: mol_type = other DNA
atgaacgggaccaggaattggtgcacccttgttgatgtacaccccgaggatcaggcggccggtagcgtggacattttgaggctaacccttcaaggcgaactgaccggagacgagttggagcacatcgctcagaaagcgggacgcaagacatacgccatggtctcgtcacattctgcgggtcacagtctggcaagcgagttggtggaatcccatgacggccacgaagagatcatcaaagtgtacctcaaggggaggtcgggcgataagatgatacacgaaaagaatatcaaccagctgaaaagtgaagttcaatacattcaggaggcccgcaattgtctgcagaagcttcgagaagatatatcttccaagctggatcggaatctcggcgatagcctccaccggcaggagatccaggtcgtgcttgagaagccgaacggctttagccagtcacctacagctctctactctagccccccggaagtggacacctgcatcaatgaggacgtagagagtcttcgaaagaccgttcaggatctcttggccaaactgcaagaggcaaaacggcagcaccagtctgattgcgttgcattcgaagtgactctttcccgttaccagcgagaagcggaacagagcaatgtcgcactgcaacgggaggaggacagagtggagcagaaggaagcagaggtgggcgaactgcagcggagactgctgggcatggagacggagcatcaggctctgctagccaaagttcgagaaggcgaagtcgctctggaggagctgaggtctaataacgcagattgccaggctgaacgggagaaggccgcgaccctggagaaagaggttgccggtttgcgcgagaagatccatcacctcgatgacatgttaaagtcccagcagaggaaggtgaggcagatgattgagcagctgcagaacagcaaggcagtgatccaatcgaaggatgcaacaatacaagagttgaaggagaagatcgcgtacttggaggccgaaaacctagagatgcatgaccgtatggagcatctgatcgaaaagcagatttcccatggcaacttcagcactcaggcgcgtgccaaaaccgagaaccctgggtctatcaggatttcaaagcctccatcccctaaacccatgcccgtgattcgagtggtcgaaacc

SEQ ID NO: 20385 - DNA, 1170 bp, synthetic construct
  misc_feature 1..1170: note = source = /note="Description of Artificial Sequence: Synthetic coding sequence"
  source 1..1170: mol_type = other DNA
atgaacggtacgagaaactggtgtaccctcgtggatgttcacccggaggaccaggccgccggatccgtcgatatcctgagactgacccttcaaggagagctgactggcgacgagttggagcacattgcccaaaaggcagggcggaaaacttacgctatggtatcaagccattcggccggtcactcgctggcctcggaactcgtggaatctcatgatggccatgaagaaatcatcaaggtgtacctgaaggggcggtcaggtgataagatgatccacgagaaaaacatcaaccaattgaagtcagaagtccaatacatccaagaagcacggaactgcctgcagaaattgcgcgaagatatctcctcgaagctggaccgcaatctgggagactcccttcaccggcaagagatccaggtggtcctcgagaaacccaatgggtttagccaatcacctaccgcgctgtattcaagtccacctgaggtggacacttgcattaatgaagatgtggaatcgttgcgcaagaccgtccaggacctgctggctaagctgcaggaagccaagcgccagcaccagtcggactgtgtcgctttcgaagtcaccctgtccagataccaacgcgaggctgagcagtcgaatgtcgcgcttcagcgcgaggaagatcgcgtggaacaaaaagaagctgaggtcggagagcttcaaagacggctcttgggcatggaaactgaacatcaggcgctgctcgctaaagtgcgggaaggggaagtggccctcgaggagctgcgctcgaacaacgcggactgccaggcggagagggagaaagcagcaactttggagaaagaagtggccggactgcgtgagaagattcatcacctggacgatatgctgaagtcgcagcaacggaaggtgaggcagatgatcgaacaactgcaaaattcgaaggcggtcatccagtccaaggatgccaccatccaggaactgaaggagaagatcgcctaccttgaggccgagaatctggaaatgcatgaccgcatggagcatctgatcgaaaagcagatatcgcacggcaacttctctacccaagcaagggccaagactgagaaccctggaagcatcaggatttcgaaacccccatcccccaagccaatgccggtgatccgcgtagttgaaacc

SEQ ID NO: 20386 - DNA, 1170 bp, synthetic construct
  misc_feature 1..1170: note = source = /note="Description of Artificial Sequence: Synthetic coding sequence"
  source 1..1170: mol_type = other DNA
atgaatgggacacgaaactggtgcaccttggtggatgtccatccggaggatcaagccgccggtagcgtcgacatcctgcggctgacgctccagggggaactgacaggagatgagcttgagcacattgctcaaaaggccggacggaaaacttatgcaatggtaagcagccatagtgccgggcattccctggcaagtgagctcgtggagagccatgacggacatgaagagatcatcaaggtttacttgaagggtaggtccggggataagatgatccacgagaagaacatcaaccagttgaagagcgaagtgcagtatatccaggaggctagaaattgccttcaaaagttgagagaggacatttcttctaaactggaccgcaatctgggcgacagcttgcatagacaggagatccaggtagtgctcgaaaagcccaacggcttttctcagagccctactgcactgtattcaagcccgccggaagtggacacttgcattaatgaagacgtcgagagtctgcggaagaccgttcaggacctgcttgctaagctgcaggaggccaaaagacagcaccagagcgattgcgttgcttttgaggttacactttctcgctaccagagggaagctgagcagtccaatgttgccctgcagcgagaggaagatagggtcgaacagaaggaggcagaagtcggggagcttcagcgccgactgttgggcatggagacagaacaccaagcactcttggccaaagtgagggaaggcgaggtggcattggaggagctcaggtccaacaatgctgactgccaggccgagcgggagaaggctgccaccctcgagaaggaagtggccggcctccgcgaaaaaatacaccacttggacgacatgctcaaatctcagcagcgcaaagtccgacagatgatagagcagctgcagaatagcaaggctgtcattcagagcaaagacgctaccattcaggaactgaaggaaaaaatcgcttacctcgaggccgagaatttggaaatgcacgatcggatggagcatttgattgaaaagcaaatctcccacggaaacttctccacccaagctagagccaagactgagaatccaggatctatccggatatctaagcccccttccccaaagccaatgccagtaatcagggttgtggagaca

SEQ ID NO: 20387 - DNA, 1170 bp, synthetic construct
  misc_feature 1..1170: note = source = /note="Description of Artificial Sequence: Synthetic coding sequence"
  source 1..1170: mol_type = other DNA
atgaatggaacccggaattggtgtaccctagttgacgtccaccctgaggaccaagctgctgggtccgtcgatattcttcggctgacattgcagggggagctgaccggcgacgaactggaacatattgcgcagaaagcaggaaggaagacctatgccatggtaagttctcattcggcgggccattcgctggcatctgagttagtggaaagccatgatggacatgaagagatcattaaagtgtatttgaaggggcggtccggcgacaagatgatccacgagaagaatatcaatcagctcaaaagtgaggtccagtacattcaggaggcccgtaactgtcttcagaagcttcgtgaggatatatcaagcaagctggacagaaatctcggcgattctctacatagacaggagattcaggtagtcctggagaagccaaatggatttagccagagcccgacagctctgtacagcagtccgccagaagtcgacacctgtatcaacgaagacgtcgagtccctcagaaaaactgtacaggatttgctggcgaagttgcaagaagcaaaaagacagcaccaaagcgactgtgtcgcatttgaggtgacactttcacggtatcagagggaggctgagcaatcaaatgtggcccttcagcgggaggaggaccgggttgagcaaaaagaggccgaagttggagagctccagcgccggttgctgggaatggagactgagcaccaggctttgctagcaaaggtaagggagggcgaggtggctctggaagaattgcggtcaaataacgctgattgccaagctgagagagagaaggctgccacattggagaaagaggtggcaggactgcgcgagaaaattcaccatctggatgacatgttgaagagccagcaaagaaaagtgaggcagatgatcgagcagctgcagaactccaaagcggtgatacagagtaaagacgccactatccaggagctcaaagagaagatcgcatacctggaggccgaaaatctagagatgcacgaccggatggaacacttgatcgaaaaacagatcagtcatgggaatttttcaacccaagccagggccaagacagagaatccaggctccatacggatcagcaagccgcccagcccaaaacctatgcccgtgatacgcgtagttgagacc

SEQ ID NO: 20388 - DNA, 1170 bp, synthetic construct
  misc_feature 1..1170: note = source = /note="Description of Artificial Sequence: Synthetic coding sequence"
  source 1..1170: mol_type = other DNA
atgaacggaacccggaactggtgcaccctggtggatgtgcatccagaagatcaagcagcaggcagcgtggacattctcagactcacgttgcaaggggaacttaccggggatgagctggaacatattgcacaaaaggcaggacggaaaacttacgcaatggtgtcctcccattcggcaggacattcgctcgcctcggaattggtggaaagccatgatggtcatgaagagatcattaaggtgtatctgaaaggaagatcaggtgacaagatgattcacgaaaagaacataaatcagctcaagtcggaggtgcaatacattcaggaggcccggaactgtctgcaaaagctgcgagaagatattagctcaaaacttgatcgcaatctcggagatagtctgcacagacaggaaatccaggtggtgctcgaaaagcccaatggtttttcgcagagccccaccgctctttactcgagccctcctgaggtcgatacctgtatcaatgaagatgtggaatcgcttaggaaaactgtgcaagatctccttgcaaagctgcaggaagccaagcggcagcatcagtcggattgcgtggcttttgaggtgactctgtctaggtaccagagagaagccgaacaatcgaacgtggcccttcagagggaagaggatcgggtggagcagaaggaggcggaagttggggaactccaaaggagactccttggtatggaaaccgagcaccaagccctgcttgcaaaagtgagggaaggtgaggtggctctggaagagttgagatccaataacgccgattgccaggcagaacgtgagaaggcggccaccctggagaaagaagtggcaggtttgcgtgaaaagatccaccatctggatgacatgctgaagtcccagcagaggaaagtgcgtcaaatgatcgaacagctccaaaactcgaaggcggtgattcagagcaaagacgcaaccatccaagagctgaaggagaaaattgcatacctggaggccgaaaacctcgagatgcacgatagaatggaacaccttatcgaaaagcaaatatcccatggaaactttagcacccaagcacgggcaaagactgaaaacccaggctccattcgcatttccaagcccccctcaccgaagcctatgcccgtcatcagagtggtggaaacc

SEQ ID NO: 20389 - DNA, 1170 bp, synthetic construct
  misc_feature 1..1170: note = source = /note="Description of Artificial Sequence: Synthetic coding sequence"
  source 1..1170: mol_type = other DNA
atgaatggtacgcgtaattggtgtacgctagtagatgtacatccggaagatcaagcggcgggttcggtagatatactacgactaacgctacaaggtgaattaacgggtgatgaattagaacatatagcgcaaaaagcgggtcgaaaaacgtatgcgatggtatcgtcgcattcggcgggtcattcgttagcgtcggaactagtagaatcgcatgatggtcatgaagaaataataaaagtttatctaaaaggtcgatcgggtgataaaatgatacatgaaaaaaatataaatcaactaaaatcggaagttcaatatatacaagaagcgcgaaattgtctacaaaaactacgagaagatatatcgtcgaaattagatcgaaatctaggtgattcgttacatcgacaagaaatacaagttgtactagaaaaaccgaatggtttttcgcaatcgccgacggcgctatattcgtcgccgccggaagtagatacgtgtataaatgaagatgtagaatcgttacgtaaaacggtacaagatttattagcgaaactacaagaagcgaaacgacaacatcaatcggattgtgtagcgtttgaagttacgctatcgcgttatcaacgagaagcggaacaatcgaatgtagcgctacaacgagaagaagatcgagtagaacaaaaagaagcggaagttggtgaactacaacgacgtctactaggtatggaaacggaacatcaagcgttactagcgaaagttcgagaaggtgaagttgcgttagaagaactacgatcgaataatgcggattgtcaagcggaacgtgaaaaagcggcgacgttagaaaaagaagtagcgggtttacgtgaaaaaatacatcatctagatgatatgttaaaatcgcaacaacgtaaagttcgtcaaatgatagaacaattacaaaattcgaaagcggttatacaatcgaaagatgcgacgatacaagaactaaaagaaaaaatagcgtatttagaagcggaaaatctagaaatgcatgatcgtatggaacatttaatagaaaaacaaatatcgcatggtaatttttcgacgcaagcgcgtgcgaaaacggaaaatccgggttcgatacgtatatcgaaaccgccgtcgccgaaaccgatgccggttatacgagttgtagaaacg

SEQ ID NO: 20390 - DNA, 1170 bp, synthetic construct
  misc_feature 1..1170: note = source = /note="Description of Artificial Sequence: Synthetic coding sequence"
  source 1..1170: mol_type = other DNA
atgaacggaaccagaaactggtgcacactggtcgacgtccatcccgaagatcaagcagcaggttcagtggacatacttaggcttaccctgcaaggagaactgaccggagatgagcttgaacacatcgctcagaaagctggaaggaagacgtatgcaatggtttctagccactccgcaggacattcactggctagcgaactcgtcgagagccacgacggacacgaggagattatcaaggtctacttgaaagggagaagcggcgataagatgatccatgagaagaacataaaccagctgaagagcgaagtgcaatatatccaggaggctaggaactgcctacagaagctgcgggaggacatctccagcaagttggacaggaacctcggtgactctctgcatagacaggaaatccaggttgtgttggagaagcccaacggattctctcagtctcctaccgctctctattcgagcccgcctgaagttgatacttgtataaacgaagatgttgaaagcctgcgcaaaaccgttcaagatttactggccaaactgcaggaggccaaaaggcaacatcaaagcgactgcgttgcttttgaagtgacgctcagtagataccagagggaggctgagcaatctaatgttgccttgcagagagaagaagacagagtggaacaaaaagaagccgaagtgggggaactgcaaagaaggcttcttggaatggaaacagagcatcaggctctgctggctaaagtaagggaaggcgaggtagccttagaggaactccgaagcaacaacgcggactgccaggccgagcgcgaaaaggccgccacactggagaaggaagtcgccggcctccgggaaaagatccaccacttagacgacatgctgaagagccaacagaggaaggtgagacaaatgatcgaacagctgcaaaacagcaaagccgtcattcagtcaaaagacgcgactatccaggaactcaaggaaaagatcgcttatcttgaagccgagaatcttgagatgcatgaccgcatggagcatctgatagaaaagcaaatttcccacggaaactttagcacacaagccagggctaagacagaaaatcccggcagcatcagaatatccaaacccccatcacccaagccaatgcccgtcatcagggtggtggaaaca

SEQ ID NO: 20391 - DNA, 1170 bp, synthetic construct
  misc_feature 1..1170: note = source = /note="Description of Artificial Sequence: Synthetic coding sequence"
  source 1..1170: mol_type = other DNA
atgaatggcaccaggaattggtgtacattagtcgacgtgcatcctgaggatcaggcagccggtagcgtggatattctgaggctgaccctacaaggggagctcacaggcgatgagctggagcatatagctcaaaaggccgggcggaagacatatgccatggttagttctcactccgccggccactctctggctagcgagcttgtggagagtcacgatgggcacgaagagatcataaaggtgtatctaaaggggcgtagcggcgataagatgatccacgagaagaacataaaccaactcaaatccgaagtgcagtacatccaggaagcaagaaactgcctccagaagttacgagaagatatatcaagcaaattggataggaacctgggcgatagtctgcacaggcaggagattcaggtcgtccttgagaagcctaatggcttttctcagagtcccacagcactgtacagctctcctcctgaggttgacacctgtatcaacgaggatgtggagagtttgagaaagaccgtgcaggacctcctggctaagttacaagaggcaaagcgccaacatcagagtgactgcgttgcatttgaggttactctcagtagatatcagcgggaagccgagcaaagcaatgtcgcattgcagagagaggaagacagggttgaacaaaaggaggctgaggtgggcgagctacagcgccggttattaggcatggaaacagagcatcaggccttactggcaaaggttagggagggggaagtcgcacttgaggaactgaggagcaacaacgccgattgccaggccgagagagagaaggccgctactctggaaaaggaggtggccggtcttcgcgagaaaattcatcaccttgatgacatgcttaagtctcagcagaggaaagtacgccagatgattgagcaactgcagaactccaaggccgtgatccagagcaaagatgccactatccaagagctgaaggagaaaatcgcctatctggaggctgaaaatcttgagatgcatgataggatggaacacctcatagaaaagcagatatcccacggcaatttctcaacccaggcccgcgcaaaaaccgagaatccaggatccattaggatctccaaaccaccttctcccaagcctatgcctgttattagggtggtcgaaact

SEQ ID NO: 20392 - DNA, 1170 bp, synthetic construct
  misc_feature 1..1170: note = source = /note="Description of Artificial Sequence: Synthetic coding sequence"
  source 1..1170: mol_type = other DNA
atgaatggaacacgaaactggtgtactctagtggacgttcatccagaagatcaagcagctggatccgttgatattctccgtcttactctacagggagaactcacgggagatgaactcgagcacattgcacaaaaagcggggagaaagacctatgcgatggtgtcatcccactccgccggtcacagcctggcaagtgagctcgtcgagtcacatgatggacatgaagaaatcattaaggtttacctgaagggacggtcaggagataagatgattcatgagaaaaatattaatcaattgaagtccgaggtccaatatattcaggaagctcgcaattgtctacaaaagcttagagaagacatctcttctaaattagatcgaaatctaggagattctctacatagacaagaaattcaagttgtgcttgaaaagccaaacggttttagccagagcccaaccgcactctacagctcgcctccagaagttgacacgtgtattaatgaggatgtagagtcccttcgtaaaacggttcaagatctacttgctaaactgcaggaagctaaaagacaacatcagtcagattgcgtcgcatttgaagtaacattatccagatatcagcgtgaggcagagcagtcaaacgtggcccttcagcgtgaggaagaccgtgtggagcagaaggaagcagaagttggagaattgcaacgaaggcttcttggaatggagactgagcaccaagctcttttagctaaggtgagagagggtgaggtggcactcgaagagctacgctcaaataacgcggattgccaagccgaacgagagaaggcggctacccttgaaaaagaagtcgctggattgcgggagaaaatccaccacttagacgatatgcttaaatctcagcaaagaaaagtcaggcaaatgattgaacaattacaaaactcaaaagcagtgatccagtccaaagatgctacaatccaggagctaaaggagaagatcgcttacttagaggcggagaatctcgaaatgcatgatcgtatggaacaccttatcgagaagcagattagtcatggtaatttctctactcaagctcgggcgaagacggaaaaccctggaagtattcgtattagtaagccaccaagcccaaaaccaatgccagtgattcgtgtggtcgagaca

SEQ ID NO: 20393 - DNA, 1170 bp, synthetic construct
  misc_feature 1..1170: note = source = /note="Description of Artificial Sequence: Synthetic coding sequence"
  source 1..1170: mol_type = other DNA
atgaacggaacgcgaaactggtgtaccctcgtggatgtccatccggaagatcaagcggctggatcggttgatattctgagactcaccctccagggtgaacttaccggagacgaactcgagcacatagcccaaaaagcagggcgtaaaacttacgccatggtcagctcccacagcgcaggacattcgctggcatccgagctggtcgaatcccatgacggtcacgaagaaatcatcaaggtgtaccttaagggtcgctcaggcgacaagatgattcatgagaagaacatcaatcagctgaaatctgaggtgcagtacatccaagaagcacgtaactgtctgcagaaacttagagaagatatctcttcgaaacttgatcggaaccttggggattcgcttcatcgtcaggaaattcaggtcgtgcttgagaaaccgaatggattttcgcagagcccgaccgcgttgtattcgagccctccagaagtggatacgtgtattaacgaggatgtggaatccctgcgtaagactgtgcaggatctgctggcgaagttgcaagaagcaaagagacaacaccagtccgattgtgtggcattcgaagtaacgctttcgaggtaccagagagaagcagagcagagcaatgtggcactccaaagggaggaggatcgcgtggagcaaaaggaagcagaggtcggagaactgcaaaggcggcttttggggatggaaaccgagcatcaggcacttctcgctaaggtgcgggaaggcgaagtcgcacttgaagaacttcgctccaataacgctgattgtcaggccgaacgggagaaggcagccactctcgaaaaagaagtcgcaggactccgagagaaaatacatcatctggacgacatgctgaagtcgcagcaaaggaaggtgagacaaatgatcgagcagctccagaacagcaaggcggtcatccaatcgaaggatgcaaccattcaggagcttaaggagaaaatcgcatacctggaagcagaaaacctcgagatgcatgatagaatggaacacctgattgaaaagcaaatttcccacggtaacttctctacccaagcaagggcaaagactgaaaaccccggttcgatcaggatttccaagcccccttctcctaaacctatgccagtgattagagtggttgaaacc

SEQ ID NO: 20394 - DNA, 1170 bp, synthetic construct
  misc_feature 1..1170: note = source = /note="Description of Artificial Sequence: Synthetic coding sequence"
  source 1..1170: mol_type = other DNA
atgaacggtacccgtaattggtgcactttggtggacgtgcatccagaagatcaagcagcgggatccgtggacattctgcgccttactctgcagggcgaacttacgggggatgaactcgagcatatagcgcaaaaggcaggccggaaaacttacgctatggtgtcgtctcattcagcaggacatagcctggcatcggagctcgtggaatcacatgatgggcatgaggaaatcatcaaggtgtacttgaagggtaggtcgggcgataagatgattcacgagaagaacattaaccaactgaagtccgaagtgcagtatatccaggaagcgagaaactgccttcaaaaactccgagaggatattagcagcaaacttgatagaaaccttggggattcgctccataggcaggaaatccaagtcgtgctcgagaagcctaatgggttctcgcagagcccgaccgctctctactcgtcgcctcccgaagtggatacttgtatcaacgaagatgttgaaagcctcagaaagacggtgcaagatctgctggcaaagctgcaagaggcgaagcgacaacaccaatccgattgtgtggccttcgaagtcactctgtcgaggtaccaaagagaagccgaacagtcgaatgtggccctccagagggaagaggacagagtggaacagaaggaggcagaagtgggtgagcttcaacgccggcttctcggtatggagactgagcatcaagccctcctggcaaaggtgagggaaggtgaagtcgcgctggaagagcttcgctccaacaacgctgattgtcaagccgagagagaaaaagcagccacccttgaaaaggaggtggccggactgcgagaaaagatccatcacctggatgacatgctgaagtcgcaacaaagaaaggtcagacaaatgattgaacagcttcaaaactcaaaagctgtgattcaatcaaaggatgcgaccatacaggagctgaaagaaaagattgcatacttggaggccgagaatctggagatgcatgataggatggaacatctgattgaaaaacaaattagccatggcaacttttcaacgcaggctagagccaaaactgaaaatcccggttcgattaggatttcaaagcctccgtcccccaagccaatgcctgtgattcgtgtggtggagact

SEQ ID NO: 20395 - DNA, 1170 bp, synthetic construct
  misc_feature 1..1170: note = source = /note="Description of Artificial Sequence: Synthetic coding sequence"
  source 1..1170: mol_type = other DNA
atgaacggcacccgcaactggtgtacattggtggacgttcatcctgaagatcaggctgcagggtctgtagatattctccggctgacactacagggagaactcacgggcgatgagctggaacacatcgctcagaaagctggcaggaaaacttacgctatggtgtcttcccacagtgcaggccattctcttgcctcagaactagtggagtctcatgacggacatgaggaaataattaaggtgtacctgaagggccggagtggcgacaaaatgatccacgaaaaaaacataaatcagttgaagagcgaggtacagtatattcaagaggcccgaaactgtctgcaaaagctgagagaggacattagcagtaaactggatcgtaacctgggtgacagtctgcaccgccaggagattcaagtggtgctggaaaagcccaacgggttcagccaaagccctactgctttatatagttctccacctgaggttgacacctgcatcaacgaggacgtggaatcactgcgtaagaccgtccaagacctcttggcaaagttgcaagaggccaaaaggcagcaccaatccgactgcgtggcctttgaagtcacactctcacgctaccagagagaggcagagcagtccaatgtagcgctgcagcgcgaagaggatcgcgtggaacagaaagaggctgaggtgggcgagctacaacgaagattattggggatggaaaccgagcaccaagcgcttctggctaaagtgcgggagggcgaggtcgctctggaggaactgcgcagtaataacgcagattgccaggcagagcgcgagaaggcggctaccctggagaaggaagtagctggtcttcgcgaaaaaatccaccacctggatgacatgcttaagagccaacaaagaaaagtacgccagatgatagaacagctacagaactccaaggctgtcatccagtcaaaggacgcaaccattcaagaacttaaagaaaagatcgcctacttggaagccgaaaatttggaaatgcacgataggatggagcatctgattgaaaagcaaatctcccacggcaatttctctacccaggcccgcgcgaaaaccgaaaaccctgggagcatccgtatcagcaaaccccctagccccaagcctatgccagtcattagggtggtggagaca

SEQ ID NO: 20396 - DNA, 1170 bp, synthetic construct
  misc_feature 1..1170: note = source = /note="Description of Artificial Sequence: Synthetic coding sequence"
  source 1..1170: mol_type = other DNA
atgaatggaactcgaaattggtgcacgcttgtggatgtccaccccgaggatcaggcagccggttccgtggacatccttcgccttacccttcaaggtgagctgactggcgatgaattggaacatatcgcacaaaaggctgggagaaaaacttatgcgatggtgtcctcccacagcgcggggcattcactggcgtcggaacttgtggaatcacatgacggtcatgaggagattatcaaagtctacctcaaggggaggtcaggagacaaaatgattcatgagaagaatatcaatcagctcaagtcggaagtgcaatacatccaagaagcaaggaattgtctgcaaaaactgagagaagatatttcgtccaagctcgacagaaacctgggcgattcactccatcggcaggaaatacaggtggttcttgagaagccaaacggtttttcccaatcccctaccgccctttacagcagcccgccagaagtggatacctgtataaacgaagatgtggagagcctccgcaagactgtgcaggatcttcttgcaaagctgcaggaagcaaagcgtcagcatcaatcggactgtgtcgcatttgaggtgactctttccagataccaacgggaggctgaacagtcaaacgtcgccttgcaaagggaggaagatagggtggaacagaaggaagccgaggtcggagaactgcaacgcagactgctgggaatggagacggaacaccaagcccttcttgcaaaagtgcgcgaaggcgaagtggctttggaagaactgagatccaataacgcagattgccaggcggagagggaaaaggcggcaactctggaaaaagaggtggcgggactgcgcgaaaagatacaccatctggacgacatgctcaagtcccagcagcgaaaggtcagacagatgattgaacagctccaaaactccaaagcagtgattcaatctaaagacgcaacgatccaggaattgaaagaaaagatcgcataccttgaagcagagaatctcgaaatgcatgatcgtatggaacaccttattgagaaacaaatttcgcatggcaacttctcaacgcaagcacgcgcaaagaccgagaacccaggttcgatcagaatctccaagccgccatccccaaaacccatgccggtgattcgtgtcgtggagact

SEQ ID NO: 20397 - DNA, 1170 bp, synthetic construct
  misc_feature 1..1170: note = source = /note="Description of Artificial Sequence: Synthetic coding sequence"
  source 1..1170: mol_type = other DNA
atgaatgggaccaggaattggtgcacattggtcgatgtgcaccccgaagaccaggccgccgggagcgtggatatattaaggctaacactgcaaggtgagctgactggcgatgaattggagcatattgcccagaaggccgggcgcaagacttatgccatggtgagctcccatagtgccggccatagcctggcctcagaactcgttgaatcacatgacggacacgaggaaattattaaggtctacttaaagggaagaagtggcgacaaaatgatccacgaaaagaatattaaccagctaaaaagcgaggtgcagtatatccaggaagctaggaactgtctccagaagctgagagaggatattagttctaagctggataggaatctaggagatagcctgcaccggcaggaaattcaggttgtgttagaaaagcccaacggattcagtcagagtccaaccgcgctttattcgtcgccgcctgaagtggacacctgtattaacgaggacgtggagtcactgcggaagaccgtgcaggacctgctagccaagctgcaggaagcaaagcgacaacatcagagcgattgcgtggctttcgaggtgacactttctagatatcagcgggaggccgaacagagtaacgttgcccttcaacgcgaagaggaccgcgtcgagcagaaggaggccgaggtcggggagctgcagagaaggctgttgggaatggaaaccgaacaccaagcattactggcaaaggtccgcgagggtgaggttgccctggaggaacttagaagcaacaatgccgactgccaagctgagagagagaaggctgctactctcgaaaaagaagtggctggcctgagggagaagatccaccatctggacgacatgctgaagagtcaacagagaaaagtgaggcagatgatcgaacagctccagaatagcaaagcagttatacagtctaaggatgccaccatccaagagcttaaagaaaagatcgcctatttagaggccgaaaacctggagatgcatgacaggatggaacatctgatcgagaagcagatctcacacggcaacttctccacacaggcccgcgccaagaccgaaaaccctggctccatcagaattagcaaacccccgtcgccaaaacctatgcctgttatccgagtggttgaaacc

SEQ ID NO: 20398 - DNA, 1170 bp, synthetic construct
  misc_feature 1..1170: note = source = /note="Description of Artificial Sequence: Synthetic coding sequence"
  source 1..1170: mol_type = other DNA
atgaatggtacccgtaactggtgcaccttggtggacgtacacccggaagatcaggcggctgggtcggtggacatcttgagactcaccctccagggggagctgaccggagatgaactggaacatatcgcccagaaggccggacgcaagacttacgccatggtgtcgtcccattccgccggacatagtctggcctccgagctggtggagtcgcatgacgggcacgaagagattatcaaggtgtacctgaaaggacggtcgggcgacaaaatgatccatgagaaaaacatcaaccagcttaagtcggaggtgcaatacatccaggaagcacgcaattgcctccagaagttgcgcgaagatattagctccaaactggatagaaatctgggcgactccctccaccgccaggagatccaggtggtactggaaaagcctaacggttttagccagtcacctaccgcgctgtacagcagcccgccggaagtggacacctgtatcaacgaagatgtggagagcctgcgcaaaactgtgcaggacctgctggcgaagctccaggaggctaagagacagcaccaatcggactgcgtggcttttgaggtgaccctgtcacgctaccaaagggaggcagaacagtcgaacgtggccctgcagagagaagaggaccgggtcgaacaaaaagaagctgaagtgggcgaactccaacggaggttgctgggaatggagactgaacaccaagcactcttggctaaagtgcgtgagggggaggtcgccctggaagaactcagatccaacaatgccgattgccaggccgaaagggaaaaggccgcgacccttgagaaggaggtcgccggactccgcgagaagatccatcacctggacgatatgctgaaaagtcagcagcggaaagttcgacaaatgatcgaacaacttcaaaactccaaggccgtcatacaatctaaggatgcaaccatccaggagctcaaggaaaagattgcatatctggaggctgagaaccttgaaatgcacgaccggatggaacatcttatcgaaaagcaaatctcacacggaaacttctccactcaagcgcgcgccaagacggagaatccaggttcgattaggatttccaagcccccatctcctaagccgatgccggtgatccgcgtcgttgaaacc

SEQ ID NO: 20399 - DNA, 1170 bp, synthetic construct
  misc_feature 1..1170: note = source = /note="Description of Artificial Sequence: Synthetic coding sequence"
  source 1..1170: mol_type = other DNA
atgaatggcaccaggaattggtgtaccctggttgacgttcatccagaagaccaagccgccggcagcgtcgatattctgcgcctgaccttgcagggtgagctcaccggcgatgaactggaacacatcgcccaaaaagccgggcgcaagacatacgctatggtgtcctcacacagcgctggccactctctggcttcggagttggtagaatcacatgacgggcacgaggagattattaaagtgtatttgaaaggccgctctggcgacaagatgatccacgaaaagaacattaaccagctgaaatctgaggtacagtatattcaggaagcacggaactgtctccagaagctgcgcgaggacatttcatccaaactggatcgtaatctgggcgattcattgcacaggcaggagatacaagtggtgctggaaaagcccaacggcttctcccagagccctacagccctgtactcttctccacctgaagttgatacctgcatcaacgaagatgttgaaagtctgcgcaagacagtccaggatcttttggcgaaactgcaagaagcaaagcggcagcatcagtcagattgtgtggccttcgaagttactctatctagataccagcgagaagccgagcagtctaatgtggcccttcagcgcgaggaagaccgtgttgagcagaaagaggctgaagttggtgaattgcaaaggcgcctgctgggcatggagactgaacatcaggcgctactggcaaaggttcgcgagggagaagtcgctttggaagaactacgctctaataacgcagactgtcaggccgagcgggagaaagccgccactctggagaaggaagtggccgggctccgagagaaaatacatcacctcgacgacatgctgaaatcccagcagaggaaggtccgccagatgattgagcaactgcagaacagcaaggccgttattcagtcgaaggacgccacaatccaggagttgaaagagaaaattgcttaccttgaagccgagaatctagaaatgcatgatagaatggaacacctgattgagaaacaaataagccatggcaatttcagcacccaggcccgggcgaaaaccgagaaccccgggtccattcgcattagtaaaccaccctctccaaaacccatgcccgttatacgggtagtagaaacc

SEQ ID NO: 20400 - DNA, 1170 bp, synthetic construct
  misc_feature 1..1170: note = source = /note="Description of Artificial Sequence: Synthetic coding sequence"
  source 1..1170: mol_type = other DNA
atgaacggaacccggaactggtgtactctggtcgacgtccatccggaagatcaggcagccggttccgtcgacatcctccggctgactctgcagggagagctcactggagacgagctcgaacacatcgctcagaaggccggcagaaaaacctacgccatggtgtcctcccactccgccggccattcactggcgtcagaactggtggagtcacacgacggccacgaggagatcattaaggtttatctgaagggccggtccggtgataagatgatacacgagaaaaacattaatcagctgaaaagcgaagtccagtacatccaagaagcgcggaattgtctgcaaaagttgcgggaggacatcagcagcaagctggacagaaacctcggagactcgctgcatcggcaggaaatccaagtggtccttgaaaaacccaacggattcagccagtcgccgacggccctgtacagctcgcctccagaggtggatacttgtatcaacgaggacgtcgaatcgctccggaaaactgtccaagatctgcttgccaaacttcaggaagcaaagcgtcagcatcagagcgattgcgtggcattcgaagtgactctgtcgcgctaccagcgcgaagctgagcaaagtaacgtcgcgctccagagggaggaagatcgggtggaacaaaaagaggccgaagtgggggagctccagcgccggctcctgggaatggaaactgagcaccaggccctcttggcgaaggtccgcgagggcgaagtggcgttggaggaactgcggtcaaataacgcggactgccaagctgagcgcgaaaaggctgccactctcgagaaggaagtggccggactgcgcgaaaagatccatcatctcgacgacatgctgaaatcccagcagcgcaaggtcagacaaatgatcgaacagctccagaactcgaaggcggtcatccaatcgaaggatgccaccatccaggagctgaaagagaagatcgcgtacctggaggctgaaaacctggaaatgcatgaccggatggagcacctgatcgagaaacagatctcacacggcaacttcagcacccaggctagagccaaaaccgagaacccgggctccatccggatctcaaagccgccatcgccgaagcctatgccagtgatccgcgtcgtcgagact

SEQ ID NO: 20401 - DNA, 1170 bp, synthetic construct
  misc_feature 1..1170: note = source = /note="Description of Artificial Sequence: Synthetic coding sequence"
  source 1..1170: mol_type = other DNA
atgaacggaacgaggaattggtgtaccctcgtggacgtacatcccgaagatcaggccgccgggagtgtagacattttgagactaacgctgcagggtgagcttactggggatgagctcgagcatattgcccagaaggctggccggaaaacttacgcaatggtgtcaagccattccgccggacattctttagccagtgaactggtggagtcacatgacgggcacgaggaaattatcaaagtctatcttaagggtcgtagtggagataagatgattcatgaaaaaaatatcaaccagctcaaaagcgaggtgcagtatatccaggaagcaaggaattgtctccaaaagctgagggaagatattagcagcaaactggataggaacctcggtgacagcctgcatagacaggagatccaggtcgtcctggaaaaaccaaacggcttttcacagagccccaccgccctgtattccagtccaccagaagttgatacctgcattaacgaagacgtcgaatccttgaggaagaccgtgcaggatttgttggcaaaactgcaggaagccaagcgacagcatcaatccgattgcgtggcgttcgaggtaacactctctagatatcagagagaggctgagcagagtaatgttgcactgcagagggaggaagaccgggttgaacagaaggaagctgaagtcggagaactgcagaggcgactactcggaatggaaactgaacaccaggctcttctggccaaagtgagggaaggcgaagtagcgctcgaagaactaaggtctaacaatgctgattgtcaggccgaaagagagaaagcggcaaccctggagaaggaagttgctggattacgtgagaagatccaccacctggacgacatgcttaagtcccagcagcgaaaagtaaggcagatgattgaacagttgcagaatagcaaggccgtgatccaaagtaaagatgcaaccatccaggagctgaaagaaaagatagcttacttggaggctgaaaatctggagatgcacgatagaatggaacacctgatagaaaaacagatttcgcatgggaatttcagcacccaagcccgggcgaaaaccgagaatcccggctccattaggatttccaaacctccaagccccaagccgatgccagttatcagggtcgtggagacc

SEQ ID NO: 20402 - DNA, 1170 bp, synthetic construct
  misc_feature 1..1170: note = source = /note="Description of Artificial Sequence: Synthetic coding sequence"
  source 1..1170: mol_type = other DNA
atgaatgggaccaggaactggtgtacactggtcgacgtgcacccggaagaccaagcagcggggtcagtggacatattgagacttactctccagggcgagctgaccggcgacgagttagagcacatagcccagaaagctgggcggaaaacatatgcaatggtgtcctctcattctgctggccatagcctggcctctgagctggtggaatcccacgacggccatgaggaaataatcaaggtatatctgaaagggaggagtggggataaaatgatacatgagaagaacatcaatcaactcaaaagcgaagtgcagtatatccaggaggctagaaattgtctccagaaactacgtgaagacatttcaagtaagttggacagaaacttgggggatagcctgcaccgacaagagatccaggtggttctggagaaaccaaacgggtttagtcagtcccctaccgctctatactcgagcccgcccgaggtagacacttgtataaacgaagacgttgagtctctcagaaagacagtccaggatctgctggctaagctccaggaggctaagaggcagcaccagagcgactgcgttgccttcgaggtcactctgagcaggtaccagagggaagccgagcagagcaacgtagcactgcagcgagaagaagatcgggtggaacagaaggaggccgaggtgggcgagctgcagaggcggctcctaggcatggaaaccgaacaccaagccctgctcgcgaaagtccgcgagggggaagtggccctggaggaactgaggtctaacaacgcagattgtcaagcagaacgtgagaaagctgcaaccttggaaaaggaagtggccggacttagggaaaagatccaccacctggacgacatgctaaaatcacagcaacggaaggtgaggcagatgattgagcagcttcagaactcaaaggctgttattcagtctaaggacgctacaattcaggagctcaaagagaaaatcgcttacctggaggcagaaaacctcgagatgcacgacaggatggagcacctaatcgaaaagcagatctcgcatggcaatttctccactcaagcaagagccaagacggagaacccaggaagcatcagaatatccaagccgccgagtccaaagccaatgccagtgatccgggtggtggagact

SEQ ID NO: 20403 - DNA, 1170 bp, synthetic construct
  misc_feature 1..1170: note = source = /note="Description of Artificial Sequence: Synthetic coding sequence"
  source 1..1170: mol_type = other DNA
atgaacgggacccgcaactggtgcacgctcgttgacgttcatccagaagatcaagcggctggatcggtggacatcctgaggctcacgcttcagggggagcttactggagacgaactggagcacattgcccagaaggctggacggaaaacctacgcgatggttagctcccattcagcgggacactcgctcgcaagcgaactcgtcgagtcacacgacggtcacgaagagatcatcaaagtgtacttgaagggacggagcggtgacaagatgatccatgaaaagaacatcaaccagctcaagtccgaggtgcagtatatccaggaagcccgcaattgcttgcaaaagctgagagaggatatctcctccaaactggataggaacctcggcgattcactccaccgccaggagattcaagtggtcttggaaaagccgaacgggttttcacaatcgcccaccgcactgtactcaagcccccctgaggtcgacacctgcatcaacgaggacgtggaatcactccgcaaaacggtgcaagacctgctcgccaagctgcaggaagcaaagcggcaacatcagtccgactgcgtcgcgttcgaggtgactctgtcacggtaccagcgggaggccgagcagagcaatgtggctctgcagagggaggaagatcgcgtcgaacagaaagaagcagaagtgggtgagctgcagagacgacttctggggatggaaaccgaacaccaggcccttctggccaaggtgagggaaggcgaggtggctcttgaagagttgcggagcaataatgcagactgccaagccgaacgcgagaaggcagccactctcgagaaggaagtggccggactgcgggaaaagatccaccatttggatgacatgctgaaatcgcaacagcgcaaagtcaggcagatgatcgagcagctgcaaaatagcaaggccgttatacaatccaaagatgccactatccaggaactgaaagaaaagatcgcgtaccttgaagccgaaaatctggaaatgcatgatcggatggagcacctgattgagaagcagatttcgcatgggaacttctcaactcaagcccgggcaaagactgaaaacccgggatcaatccgcatcagcaaaccaccttcccccaagccgatgccagtgatcagagtggtcgagact

SEQ ID NO: 20404 - DNA, 1170 bp, synthetic construct
  misc_feature 1..1170: note = source = /note="Description of Artificial Sequence: Synthetic coding sequence"
  source 1..1170: mol_type = other DNA
atgaacggaactaggaattggtgtacactagttgacgtacaccccgaggaccaggcagcagggagtgtggacattcttagactcacgcttcagggggagttgacgggggatgagctcgaacatatcgcccagaaggccggacgaaaaacttacgcaatggtaagcagccattcggctggccacagccttgcgagtgagctggtggagagccacgacggccatgaggagattatcaaggtctatctgaagggtagaagtggggataagatgattcatgaaaagaacattaaccagctcaaaagcgaagtccagtatatccaggaggccagaaactgtctgcagaaactccgggaggatatatccagcaaactcgaccgcaatctgggggattcattacatagacaggaaatccaagtcgttctcgagaaacccaacggatttagccagtctcccaccgctttgtactcgtctcctccagaggtggacacatgtatcaacgaggatgtcgaatccctgcgtaagaccgtccaggacctgctggccaaattacaagaggcgaagagacaacatcaatcagactgcgtcgcttttgaagtgacactgtctaggtaccagcgagaggcagagcaatctaacgtcgctctgcaacgagaggaggaccgcgtcgagcagaaagaagcagaagtgggcgagcttcagcgtaggctgcttgggatggagacagaacaccaggcattgttggcaaaagtcagagagggggaggtagccttagaggagttacggtccaataacgcagattgccaagccgagagagagaaggcagctactctggagaaggaagtagctgggctgcgggaaaagattcaccacctagatgatatgttgaaaagccagcagcggaaggttcggcaaatgatcgagcaattgcagaactcaaaagccgtgatacaatccaaggatgctaccattcaagaactgaaagagaaaatcgcatatcttgaggcagaaaaccttgaaatgcatgatcgcatggaacacctgattgagaaacagatctcacatggtaactttagcacacaagctagggccaagaccgagaatcccggtagtattaggatcagcaaaccaccctctcctaagcccatgcctgtcatcagggtggtggaaaca

SEQ ID NO: 20405 - DNA, 1170 bp, synthetic construct
  misc_feature 1..1170: note = source = /note="Description of Artificial Sequence: Synthetic coding sequence"
  source 1..1170: mol_type = other DNA
atgaacggtacgagaaactggtgtacgttggtggacgttcatcccgaagaccaggcagcgggtagcgttgacatcctgagactgaccctgcagggagagctgactggtgacgagcttgagcatattgctcagaaagccggaaggaagacgtacgcaatggtctcctcccattccgcgggccattccctcgcaagcgagctggtagagagccacgacggccacgaagaaatcataaaggtgtacttgaagggtcgcagtggagataaaatgatccacgagaagaatatcaaccagcttaagagtgaggtgcagtatattcaagaggctcgcaactgtctgcagaaattgagagaagacataagcagtaagttggacagaaatttgggtgatagtctccacagacaggaaatccaagttgtgctggagaagccaaatggatttagccagtcccctaccgcactttactcctcacctccagaagttgacacatgtattaatgaggatgtggagtccctgaggaaaaccgtccaggaccttttggcgaaactgcaggaggcaaagcgccagcaccagtcagactgcgtcgcttttgaggtaacgctgtcaagataccagagagaggctgagcagtccaacgtcgctctgcagcgcgaagaggatcgcgttgagcagaaggaggcagaggtgggtgaactgcaaaggcgcctgttgggcatggaaacggaacaccaggcactgttggccaaggtgagagagggcgaggttgctctggaagaactcaggtctaacaacgctgattgtcaggctgaaagagaaaaggccgccacgctcgaaaaggaagtggcaggactgcgcgagaaaatccatcacctggacgacatgcttaaatctcagcagaggaaggtgagacaaatgatcgagcaactccagaatagcaaggctgtcatccagagtaaggatgccacgatccaagagctcaaggagaaaatcgcgtacctcgaggctgagaatttggagatgcacgataggatggaacatctgatcgaaaaacaaatttctcatggcaatttttccacgcaagctagggccaaaaccgaaaaccctggttcaattagaatttcaaaacctcccagtccaaagcccatgccagtaatcagagtagttgagact

SEQ ID NO: 20406 - DNA, 1170 bp, synthetic construct
  misc_feature 1..1170: note = source = /note="Description of Artificial Sequence: Synthetic coding sequence"
  source 1..1170: mol_type = other DNA
atgaatggtacccgcaactggtgcacccttgtcgacgtgcatcctgaagatcaggccgcagggtctgtggatattctgcggctcacccttcaaggagaacttaccggtgatgaactggagcatatagcccagaaagcaggtagaaagacctacgccatggtgtcgagccattcagcaggacatagcctggcatccgaactggtcgaaagccatgatggccacgaagaaatcatcaaggtgtatctcaagggaaggagcggagacaaaatgattcacgaaaagaacattaatcagcttaagtcggaagtgcaatacatccaggaggctagaaattgcctgcagaaattgagagaggatatctcaagcaaactggacaggaaccttggggactccctgcatagacaagaaattcaggtcgtgctcgaaaagcctaacggctttagccaatcacctactgcactttattcctccccacctgaggtggatacttgtatcaatgaggatgttgagtccctgagaaagactgtgcaagacctgcttgccaaactccaggaggccaagcggcagcaccaatcggactgtgtcgcgttcgaagtgactctgagccgataccaaagagaagccgaacagtcaaatgtcgcacttcaaagggaggaggatagagtggagcaaaaagaggcggaagtgggggagctgcaaagacgtctccttggaatggaaactgagcatcaggcgcttctggcgaaagtgagagagggtgaagtggctcttgaagagctgcgctccaacaatgcggattgtcaggcggagcgcgagaaagcagcgaccctggagaaagaagtggcaggtttgagagagaaaattcatcacctggatgacatgctgaaaagccaacaacgtaaagtgcgccaaatgattgaacaactgcaaaactcgaaggctgttattcaaagcaaggatgctaccattcaagaactgaaggagaagatcgcatacctcgaggcagagaacctggaaatgcacgacaggatggaacacctcattgaaaaacagatttcccatggtaacttttcgactcaagcccgcgcaaagactgagaatcctggctccatcagaattagcaagcctccctcccctaagccaatgcctgtcatcagagtagtggaaact

SEQ ID NO: 20407 - DNA, 1170 bp, synthetic construct
  misc_feature 1..1170: note = source = /note="Description of Artificial Sequence: Synthetic coding sequence"
  source 1..1170: mol_type = other DNA
atgaatggcactaggaactggtgtactctggtcgatgttcatccagaagaccaggcggccggatctgtggacatactgaggctgactctccagggggagctaacaggcgacgagctggagcatatcgcgcagaaggccggccgtaaaacatacgccatggtgagctcacacagtgccgggcactccctggcctcagagcttgtggaatctcacgacggccacgaggagattatcaaggtgtaccttaagggacgctctggggacaaaatgatccacgagaaaaatattaaccagctgaagtccgaggtgcagtacatccaagaagcccgcaattgcttgcagaaactcagagaggacatctctagtaaactcgatcggaatctaggggattcgctccacagacaggaaatccaggtcgtactggaaaagcccaatggtttttctcagagccccaccgcactctattcttctccccccgaagtcgacacctgtatcaatgaagacgtggagtccctgcggaaaacagtccaggatctactagccaagctgcaggaggcaaagcggcagcaccagagtgattgtgtcgccttcgaagtaaccctgagtcgttaccagcgggaggcagagcagagcaacgttgcgctccagcgcgaagaagatcgagtggaacagaaagaagcagaagtgggcgagcttcagcggagactgctgggtatggagacggaacaccaagctctgctcgctaaggtgagggagggcgaagtggctttagaggaacttcgctcaaacaatgcggattgccaggccgaaagagagaaggctgccaccttggaaaaggaggtcgcgggtcttcgggagaagatccatcatttggacgatatgctcaagtcccagcagcggaaggtgcgacagatgatcgagcaactgcagaactcaaaagccgtcatccagtctaaggacgctacaattcaggagctaaaggaaaagatcgcgtacttagaagccgagaacctcgagatgcatgatcgtatggagcatttaatcgaaaaacagattagccatggaaatttttccacccaggcgcgggcaaaaaccgaaaatcccggttctatcagaattagcaagccaccctcgcccaagccaatgccggtcatccgggtagtggaaact

SEQ ID NO: 20408 - DNA, 1170 bp, synthetic construct
  misc_feature 1..1170: note = source = /note="Description of Artificial Sequence: Synthetic coding sequence"
  source 1..1170: mol_type = other DNA
atgaacggtactagaaattggtgcacactagtagatgtgcatcccgaagatcaggccgcaggctctgtagacattctgagacttacactccaaggggaattaacgggcgacgagctcgagcacattgcccagaaagctggacggaaaacatatgccatggtgtcatcgcacagtgctggtcactccctagctagtgagctggttgagtcacacgacggtcacgaagagatcatcaaagtgtacctgaagggtaggagcggagacaagatgatacacgagaaaaatatcaaccaattgaagtcagaggtccaatatatccaggaagccagaaactgtctgcaaaagctgagggaagacatcagttctaagctggaccgtaacctgggcgattcacttcatagacaggaaatccaggtagtattggagaagcccaacggcttctcccagtcccccacggccttgtattccagccccccggaagtggacacctgtattaacgaggatgttgagtcactgcgaaagaccgtgcaagacttgttagccaaacttcaagaagccaaaaggcagcaccagagcgactgtgtggccttcgaggtaaccctgtctcggtatcaacgggaagccgagcaatctaatgtcgcccttcaacgggaggaggatagggtggagcaaaaggaggccgaggtgggggagctgcaacgcagattgctaggaatggaaaccgaacatcaagccctgttagctaaggtgcgcgaaggagaagtggcattggaagagctccgctctaataacgccgattgccaggctgagcgggaaaaggccgccaccctagaaaaagaggtcgctggcctgagggagaagatccaccatctcgatgacatgctgaagtcacaacagagaaaggtgagacagatgattgagcagttacagaacagtaaagctgtgattcagtcgaaagacgctaccatccaggagctcaaagaaaagattgcctatttagaagcagaaaatctggagatgcacgaccgaatggagcacctcatcgagaaacaaatcagtcatggcaatttctccacccaagcccgcgccaaaacagagaacccagggagcatcagaatctccaagcctccttctcccaaacccatgccagtaatccgagtggtcgaaaca

SEQ ID NO: 20409 - DNA, 1170 bp, synthetic construct
  misc_feature 1..1170: note = source = /note="Description of Artificial Sequence: Synthetic coding sequence"
  source 1..1170: mol_type = other DNA
atgaacggaactcgcaactggtgtactctggtggacgtgcaccccgaggaccaggccgccgggtccgtggatattctgcgcttgaccctgcagggagaactcaccggagatgaactggagcatatcgcacaaaaagccggaagaaagacttacgcgatggtttcatcccactcggccgggcactcccttgccagcgaactcgtggaaagccacgacggacacgaagagatcatcaaggtctacctcaaaggacgcagcggagacaagatgatccacgagaagaacattaaccaactcaagtcagaagtgcagtacattcaggaagcgaggaattgtctgcagaagctgcgagaagatatctcctccaagctcgaccggaacctgggagactcgcttcacagacaagagatccaggtggtcctcgaaaaaccgaacggatttagccaatcacccaccgcactgtactcaagcccaccggaggtggacacctgcattaacgaagatgtcgaatcactgcggaaaaccgtgcaagatttgctggcaaaattgcaagaagcaaagcggcaacaccagtcggactgcgtggcatttgaagtgacgctgtcccgctaccagcgggaggccgagcagtcaaacgtggccctccagcgggaggaggacagggtggagcagaaggaagcggaggtgggcgagctgcagaggcggctgctggggatggaaaccgagcatcaggctctgctggcgaaggtgcgagaaggagaggtcgctcttgaggagctccgctcaaataacgccgattgccaggccgaacgggaaaaggctgctaccctcgaaaaagaagtggcgggactgagggagaagatccaccatctcgacgacatgctcaagtcccagcagcgcaaggtgcgccaaatgatcgaacagctgcagaactcgaaagccgtcattcagagcaaagacgctactatccaggagctcaaggaaaagatcgcatacctcgaagcagagaacctggagatgcatgaccgcatggaacaccttattgagaaacaaatcagccacggaaatttctccacccaggcccgcgctaaaactgagaacccagggtcaatccggataagcaaacctccgtcccctaagcctatgccagtgatccgagtcgtggaaact

SEQ ID NO: 20410 - DNA, 1170 bp, synthetic construct
  misc_feature 1..1170: note = source = /note="Description of Artificial Sequence: Synthetic coding sequence"
  source 1..1170: mol_type = other DNA
atgaatggtacccggaactggtgcaccctcgttgatgtgcatcccgaagatcaagccgcagggtccgtcgatatcctgagactgactctgcagggcgaactcaccggagacgagcttgagcatattgcccagaaagcaggtcggaaaacttacgctatggtcagctcccatagcgctggtcacagcttagcatctgagctggtcgaaagccatgatggacatgaggaaataataaaggtgtacctgaaaggtcgcagtggtgataagatgatccacgagaagaacatcaaccagctgaagagcgaggtgcagtacattcaggaagcccggaattgtctccagaagctcagggaagacatctcaagcaagttagatcgtaacctgggcgatagtctgcatagacaggagatacaagtggtactcgagaaacccaatgggtttagccaatctcccaccgctctctattcttcacctcctgaagttgacacatgtataaatgaagacgtggaatctctccgcaagacggtccaggatcttctggctaagctccaggaagccaaaaggcaacaccagtccgactgcgtcgccttcgaagtcacccttagtcgctaccagcgggaggctgagcagtccaacgtggccttgcagagggaagaggaccgcgttgagcagaaagaagcggaagtgggggagctgcagcggaggctcttagggatggagacagagcatcaggccctattggcaaaagtgcgcgagggtgaggtagcactggaagaactccggagcaacaacgcagactgccaggcagaaagggaaaaagccgcgaccctcgaaaaggaagtggctgggttgagggaaaagattcatcatctggacgacatgctgaagtcccagcagcggaaagttaggcaaatgattgagcagcttcagaattccaaggctgtcatccagtctaaagacgcaacaatccaagaactaaaagagaaaattgcatacctggaagctgagaacctggaaatgcatgatagaatggaacacctgatcgaaaagcagattagccacggcaatttttctactcaggccagagctaagacggaaaacccgggcagtatcaggattagtaagccaccgtctccaaaaccaatgcccgtgattagagtggtggaaacc

SEQ ID NO: 20411 - DNA, 1170 bp, synthetic construct
  misc_feature 1..1170: note = source = /note="Description of Artificial Sequence: Synthetic coding sequence"
  source 1..1170: mol_type = other DNA
atgaatggtactcggaactggtgtactctagtagacgttcatcctgaggaccaggcggcgggcagcgtggatatcttacgactcacgctgcaaggcgaacttacaggcgacgaacttgagcatattgcccagaaggctgggaggaaaacctacgccatggtctcttcacactctgccggacactccctggcttcggaactcgtcgagtctcacgatggtcacgaggaaatcataaaggtttacctgaaagggcgttccggagacaagatgattcacgagaagaatataaatcagctgaagtctgaggtacagtacattcaggaagctagaaattgcctgcaaaaattacgtgaggatatcagctctaagctcgaccgaaatttaggcgacagcctccaccgtcaggagattcaggtcgtcctcgagaagcctaatggtttctcgcagagcccgactgcattgtattcttctcctccagaggtcgatacatgcattaacgaggatgtggagtctcttcgaaagaccgttcaggacctacttgccaagcttcaagaggcaaagcggcagcaccagtcagactgcgtggctttcgaggtaactctgtccaggtatcaacgtgaagcagaacagtcaaatgtggctcttcagcgcgaggaggatagagtggagcagaaagaggctgaggtaggggagctccaacgacgcttgctcggaatggagactgaacatcaggcactgttggcgaaagtcagggagggcgaggtcgctcttgaggagctccggtctaacaatgcagactgccaagcggagagggaaaaggcagccaccctcgagaaggaggtagcgggcctgcgtgaaaagatccatcatttggatgatatgttgaagtctcagcagcgtaaggtgagacaaatgattgagcagctgcaaaattccaaggctgtcattcagagtaaggatgcaaccattcaggagttgaaggaaaaaatagcgtatctcgaggccgagaacctggaaatgcacgatcgtatggagcatctgatagagaagcaaatttcccacggcaacttcagcactcaggcccgtgctaaaaccgagaatcccggaagtatccgtatctccaaaccgccatcgccaaagccgatgccagtgatccgcgttgttgagact

SEQ ID NO: 20412 - DNA, 1170 bp, synthetic construct
  misc_feature 1..1170: note = source = /note="Description of Artificial Sequence: Synthetic coding sequence"
  source 1..1170: mol_type = other DNA
atgaatggtacaagaaattggtgcactttagtggatgtacatccagaagaccaggctgctggaagcgtggacattctccgcctcaccctacagggcgagctgaccggtgatgagctagaacacatcgctcagaaggctggccggaaaacatacgctatggtgagctctcactccgccggccactcattggcctctgaactggtagaaagccatgatgggcatgaggaaatcattaaagtgtatctcaaaggaaggagtggagacaaaatgatccacgaaaagaacatcaaccaactgaaaagtgaggttcagtacatacaggaagcgaggaattgcctccagaaactaagggaggatatcagctctaagttggatagaaacctcggcgactctctgcacagacaggagatccaggtggttctcgaaaaacctaacggattctcccagtcacctacagcgctctactcctcaccacccgaggtggatacctgcatcaatgaggacgtggagtcgttacgcaagaccgtgcaagatctcctcgcaaaactgcaggaagcaaagagacagcaccagtcagactgtgtcgccttcgaggtcaccctctccaggtatcagcgggaggccgagcagtctaacgtggctctgcagcgagaagaggatagagtcgagcagaaagaggccgaggttggggagctgcagcgccgactcctgggtatggagacagaacaccaagcattgctggctaaagtcagggaaggcgaggtggcgctggaagaacttcgcagcaataacgcggactgccaggccgagcgggagaaggctgctactcttgagaaagaggtggcaggactgcgggagaagatccatcatttggatgatatgctgaagtctcaacagcggaaggtgaggcagatgattgaacagctccagaactcgaaggcagtcattcagagcaaggacgcaactattcaggagctaaaagagaagatcgcttacctcgaagccgagaatctagagatgcacgaccggatggagcacttgatcgagaagcagatctcccatggaaatttttctactcaggcaagagccaagacagaaaatccaggaagtattcggattagcaagcccccctcccctaagccaatgccggtgattagggtggtcgaaacc

SEQ ID NO: 20413 - DNA, 1170 bp, synthetic construct
  misc_feature 1..1170: note = source = /note="Description of Artificial Sequence: Synthetic coding sequence"
  source 1..1170: mol_type = other DNA
atgaatggtacccggaattggtgcacactggtcgatgtccatcctgaagatcaggctgccggcagcgttgatattttgagactaaccctacagggcgagctcaccggcgacgaattggaacacatcgcacaaaaggccggaagaaagacctatgccatggttagctcccactccgccggacattcacttgcgtctgagctggtggagtctcatgacggtcacgaagaaattatcaaagtctatcttaaagggaggtcaggcgacaagatgatacatgagaaaaatataaaccagcttaagtccgaggtgcagtatatccaggaggcaagaaactgcctccagaaactgcgggaggacatatccagcaaattggaccggaacctgggcgactctttgcatcggcaggagatccaggtggtgctggagaaaccaaatggctttagtcagtcccccaccgctctctacagctcacctcctgaggtggatacctgcattaatgaagatgtggaaagtctgaggaagaccgtgcaggatctgctggcaaagctgcaggaggcaaagcggcagcaccaatccgattgtgttgcctttgaagtaacactatctcgatatcagcgagaggccgagcagtcgaacgtggccttacagagggaggaggatagggtcgagcagaaggaggctgaagtgggtgagctgcaaaggaggcttctgggaatggagactgagcaccaggccctgcttgctaaagtgcgcgagggggaagtcgcactggaagagctgagatcaaacaacgcagactgccaggccgaaagagagaaggccgctacgcttgagaaggaggtggccggactgcgcgaaaagatccatcatctagacgatatgctgaaaagccagcagcgcaaggttcgccagatgatcgagcagttgcagaattcaaaggccgtgatccagtccaaagacgctactatacaggaacttaaagagaaaattgcttatttggaagctgagaacttggaaatgcatgatagaatggagcacctgatcgaaaagcagatctcccacgggaattttagcacacaagcgcgggcaaagaccgaaaaccctggctccatacgaatatccaaacccccttcccccaagccaatgcctgtcataagggtcgtcgagaca

SEQ ID NO: 20414 - DNA, 1170 bp, synthetic construct
  misc_feature 1..1170: note = source = /note="Description of Artificial Sequence: Synthetic coding sequence"
  source 1..1170: mol_type = other DNA
atgaacggaacgaggaattggtgtacgttggtcgacgtgcacccagaagatcaagcggccgggtcggtggacattctgcgattgaccttgcagggagaacttaccggggacgaactcgagcacatagcccaaaaggctggacgtaagacctacgcgatggtttcgagccacagcgctgggcattccctggcctctgagctggtcgaatcgcacgacggccatgaagaaatcatcaaggtgtacctgaagggacgcagcggcgacaaaatgatccatgagaagaatatcaaccagctcaagtccgaagtgcaatacatccaggaagcgcgcaattgccttcaaaagctcagagaagatattagttcaaagctggaccggaacctcggcgactcactccatcgccaagaaatccaagtggtcctcgaaaaaccgaatggctttagccagtcaccgactgctctgtactcgtccccgccggaagtggacacctgtatcaatgaggacgtcgagtcactgcgcaaaaccgtacaagacctgctggctaaacttcaagaagcaaagcgccagcaccagagcgactgcgtggcgtttgaagtcactctgtcgcggtaccagagggaggccgagcagtcaaacgttgcccttcagcgagaagaggacagagtggagcagaaggaggcggaagtgggtgaactgcagagacgcctgcttggaatggaaacggagcaccaggcactccttgctaaagtgagagaaggagaggtggcactggaggagctccgttcgaataacgctgattgccaggccgaaagagaaaaggctgcgactctggagaaggaagtcgcgggacttcgggagaaaatccaccatctggatgatatgctcaaatcacaacagaggaaggttcggcaaatgatagagcaattgcagaactcaaaagcagtgatccagtctaaggatgctactatccaggagctcaaggaaaagatcgcatatctcgaagcagagaacctggagatgcatgatcggatggagcatctcatcgaaaaacagatttcgcacgggaacttcagcactcaggcccgggcaaagactgaaaaccccggctctatcagaatctcgaaacctccaagcccgaaacctatgccagtgatccgggtcgtggagact

SEQ ID NO: 20415 - DNA, 1170 bp, synthetic construct
  misc_feature 1..1170: note = source = /note="Description of Artificial Sequence: Synthetic coding sequence"
  source 1..1170: mol_type = other DNA
atgaacgggactcgcaactggtgcactttagtggacgtgcatcctgaggatcaggccgctggaagtgtcgatatacttcggcttactcttcagggagagcttacaggagacgaactcgaacacatcgcccagaaagccgggagaaagacatacgcaatggtttcctcacattcagccgggcatagtctggcatctgaattagtcgaatcacatgatgggcatgaggaaataatcaaagtttatctgaaagggaggagtggagacaaaatgatccatgaaaaaaatatcaatcagctgaaaagtgaagtccagtatattcaggaagctcggaattgtctccagaaattacgagaagatatctcatcaaaactcgataggaacctcggagattcactccatcggcaggaaattcaggtggttttggaaaagcccaacggattttcgcagagtcctacagccctctatagttcgcctcctgaggtggatacatgtatcaacgaagatgttgaatccctacgaaaaacagtgcaggatctgcttgcaaaacttcaggaagccaagcggcagcaccagtctgattgcgtggcgtttgaagtgactctcagtaggtatcaacgcgaagcagaacagtcaaatgtggctctgcagagagaagaggatcgagtggaacagaaagaagctgaggtaggagaactccagaggcggctcctcggaatggaaacagagcatcaggcattattagcaaaggtcagagagggagaggttgctctggaagaattacggtctaacaacgctgattgtcaggcagaaagagaaaaagccgccacattggaaaaggaggtggctgggttgagggaaaagatacaccaccttgatgatatgctcaagtcacagcagagaaaggtcaggcagatgatagaacagcttcagaattcgaaggctgttatccagtctaaagatgccactatccaggaattaaaagaaaaaattgcgtacctggaagccgaaaaccttgaaatgcatgataggatggagcatcttatagaaaagcagatttctcacgggaatttttccactcaggctagggcgaaaacagagaaccctggatcgatccgaatatctaagcccccctcccctaaaccaatgcctgttatcagagttgttgaaact

SEQ ID NO: 20416 - DNA, 1170 bp, synthetic construct
  misc_feature 1..1170: note = source = /note="Description of Artificial Sequence: Synthetic coding sequence"
  source 1..1170: mol_type = other DNA
atgaacggaactcggaattggtgcactctggtggacgttcatccggaagatcaagcagcgggctctgtggatatccttagactgactctgcaaggcgaactcaccggcgatgagttggagcatatcgcccaaaaagctggaaggaaaacttacgctatggtgtcgtctcacagcgccggacacagcctggcctccgaactggtggaatcccatgacggccatgaagaaatcattaaagtgtacctgaagggacgctcaggagacaaaatgatccacgaaaagaacattaatcagctgaagtccgaggtgcagtacatccaggaagcgcggaactgtctgcagaagctcagagaagatatcagctccaagttggatagaaacctcggagactcactccatcgccaggagatccaagtggtgctggagaaaccgaacggattctcacaaagcccaaccgccctttactcaagcccgcctgaggtggacacttgcatcaacgaggacgtggaatccttgagaaagaccgtgcaagacctgctcgctaagctccaagaggctaaacgccagcatcaatcggattgcgtcgcttttgaagtcactttgagccgataccagagagaggcagaacaatcgaatgtggctctgcaacgggaagaagatagggtggaacagaaggaagctgaagtgggagaactgcagcgccgcttgctcggaatggaaaccgaacatcaggctttgctggccaaagtgagagaaggcgaggtcgccctggaagagctccgttcaaataacgcagactgccaagcggagcgcgaaaaggccgccaccctcgagaaggaagtcgccggcctccgggagaagatccatcacctggacgatatgctgaagtcccaacagcgcaaggtcagacagatgattgaacagctgcagaactccaaggccgtcattcagtcgaaggacgccaccatccaggaactgaaagaaaagattgcctacctggaggccgaaaaccttgagatgcacgacaggatggaacacctgatcgaaaagcagatcagccatgggaatttcagcacccaggcgcgggctaaaactgaaaacccaggatccataagaatctcgaaacctcccagccctaagccaatgccggtcatccgcgtggtcgaaact

SEQ ID NO: 20417 - DNA, 1170 bp, synthetic construct
  misc_feature 1..1170: note = source = /note="Description of Artificial Sequence: Synthetic coding sequence"
  source 1..1170: mol_type = other DNA
atgaatggtaccagaaattggtgcactcttgtggatgtgcaccctgaggaccaggcagcagggtcagtcgatattctccgcctgactctgcaaggagaactcaccggggatgagctcgagcacatcgcacaaaaggccggtcgcaaaacctacgctatggtgtcctcgcattcggctggacactccctggcatccgaacttgtggagtcacatgatggacatgaagaaatcattaaggtctacctgaagggtcggagcggtgataagatgatacatgagaagaacattaatcagctgaagagcgaggtgcaatacattcaagaagcaagaaactgcctgcaaaagctgcgggaagatatttcctcgaagctcgaccgcaacctcggggattcactgcacaggcaagagattcaggttgtgcttgagaaacctaacgggttttcgcagagcccaactgcactttacagctccccaccggaggtggacacctgtattaacgaggacgtcgagagcctgcggaaaactgtgcaagacctgctcgcgaaactgcaggaagcaaagagacagcatcaatccgattgcgtggcgttcgaagtgactctgtcgcgttaccaacgtgaagcagagcagtcgaacgttgcgcttcagcgtgaggaggatcgagtggaacaaaaggaagccgaggtcggtgaactgcagagaagattgcttggaatggagactgagcaccaggctctgcttgcaaaggtgcgcgagggagaagtggcactcgaagaactgcggtcgaacaacgcggactgccaggcagaacgggaaaaggccgccaccctggagaaggaagtggcaggattgcgagaaaagatccatcatctggacgatatgctgaagtcccagcaaaggaaggtgagacagatgattgaacaattgcagaattcgaaagcagtgatacaaagcaaagacgcaactatacaagaacttaaagaaaagatcgcatacttggaggctgagaacttggaaatgcatgacaggatggaacatcttatcgaaaaacagatttcgcatggaaacttttccacgcaagcgcgagccaagactgaaaacccaggatcgattagaatttcgaagcctccttcccccaagcctatgccagtgataagagtggtggagact

SEQ ID NO: 20418 - DNA, 1170 bp, synthetic construct
  misc_feature 1..1170: note = source = /note="Description of Artificial Sequence: Synthetic coding sequence"
  source 1..1170: mol_type = other DNA
atgaatgggacgcgtaattggtgtaccctcgttgatgtgcatcctgaagatcaagcagcaggtagcgttgatatacttagattgactcttcaaggagaactcacgggggatgaacttgaacatattgcccagaaggccggaagaaagacctacgctatggtgagctcgcattcagcaggtcattcgcttgcgagtgaactcgtcgaaagccacgatgggcacgaggaaatcattaaagtgtacctcaagggaagatccggcgataagatgattcacgaaaagaacataaaccagctcaaatcggaagtccagtacatccaggaggcacgcaactgcctgcagaaacttcgggaagatatttcctcaaagctggaccgaaacctcggggattcactgcatagacaggaaattcaggtcgtattggaaaagcctaatggtttttcacagtccccaactgcgctctacagctcgccaccagaggtcgatacttgtattaacgaggatgtggagtcacttcgcaagaccgtgcaggacctcctggcaaagctccaagaagcaaaacgacagcaccagtcagattgcgtggcatttgaggtcaccctgtcgcgttatcaaagggaagcagaacaaagcaatgtggcactgcagcgggaggaggacagggtcgaacagaaggaggcagaagtcggagagctgcaaagacgacttctgggaatggaaactgagcaccaagcacttctggctaaggtacgggagggggaagtggcacttgaagaactgagaagcaataatgccgactgccaagcagaacgggagaaggcggcaactctcgaaaaggaagtggcaggactcagggaaaagattcatcatctggacgatatgcttaagtcccaacaacggaaagtgagacaaatgattgaacaacttcagaactccaaggctgttatccaatcgaaggacgccactatccaagaactcaaagagaaaatagcgtatttggaagctgaaaacctggaaatgcatgaccgtatggaacacctgatcgaaaagcaaatttcccatggcaacttctcgacccaggcaagagcaaaaaccgaaaaccctggatcaatccggatatcgaaaccccctagcccaaagccaatgcctgtgatccgggtggtcgaaacc

SEQ ID NO: 20419 - DNA, 1170 bp, synthetic construct; identical to SEQ ID NO: 20395
  misc_feature 1..1170: note = source = /note="Description of Artificial Sequence: Synthetic coding sequence"
  source 1..1170: mol_type = other DNA

SEQ ID NO: 20420 - DNA, 1170 bp, synthetic construct
  misc_feature 1..1170: note = source = /note="Description of Artificial Sequence: Synthetic coding sequence"
  source 1..1170: mol_type = other DNA
atgaacggcactagaaattggtgcacattggtggatgtccacccagaggatcaggctgccggatcggttgatattttgaggctcactctccaaggggagctgaccggagatgagttagagcatattgcacagaaggcaggccgaaagacatacgctatggtctctagccacagtgctggacactctctggccagcgagttagtagaaagtcacgacggacacgaagagatcattaaggtatacctgaaaggacgtagtggtgataaaatgattcacgaaaagaacataaaccagttgaaatctgaggtgcagtatatccaggaggcgcgtaactgcctgcaaaaattgcgcgaggatatttccagcaaactggatcggaacctcggagacagcctgcatagacaggagatccaggtagtactcgagaaaccgaacggattctctcagtcccctaccgcactctacagttcaccccctgaggtggatacgtgcatcaatgaagatgttgaatccctcagaaagaccgtgcaggacctcctggcaaaactccaggaggccaagcgccagcaccaatctgactgcgtggcctttgaagtaaccctgagtaggtatcaacgggaggctgagcagtctaatgttgccctgcaaagggaagaagatagagtcgaacagaaggaagcggaagtcggggaacttcaaaggcgcctgttagggatggaaacggaacatcaagcccttctcgccaaggtccgggagggggaggtggctttagaggagcttcggtctaataatgcagattgtcaagccgagcgggagaaagcagctactctggaaaaggaagttgctgggcttcgggaaaagatccaccatctggacgacatgcttaagagccaacagcgcaaggtacgtcagatgatcgagcagttgcagaattcgaaagctgtgattcagtcaaaggacgccactattcaggagttaaaagagaagatcgcatacttagaggctgaaaatttggagatgcatgataggatggagcacttgattgagaagcagatcagccacgggaattttagcacacaggcccgagcaaagacggagaatccgggctccatccggattagcaagcccccgtctccaaaacccatgcctgtgataagggttgtagaaaca

SEQ ID NO: 20421 - DNA, 1170 bp, synthetic construct
  misc_feature 1..1170: note = source = /note="Description of Artificial Sequence: Synthetic coding sequence"
  source 1..1170: mol_type = other DNA
atgaacggtactaggaactggtgtaccctagtggacgtgcacccagaagaccaggcggcgggctctgttgatatcctgcgactgactctccaaggcgagttaacgggagacgagttggagcacatcgcacagaaggctggacgtaaaacttatgctatggtatcctctcactccgctggccacagcttggcttctgaactggttgagtcacatgatggccatgaggaaataatcaaggtgtacctcaagggaaggtctggcgacaagatgatccacgagaagaatattaatcagctgaaatctgaggtccagtacatacaggaggctcgaaattgcctgcaaaagttgcgggaagatattagctctaagctcgaccgcaacctcggagactcactgcaccgccaggaaatccaggtagttttggaaaaaccgaacggattctctcagtctcccaccgccctgtactcttcccccccggaagtcgatacatgcatcaatgaggacgtggagtccctgcggaagaccgtgcaggatctgctggctaagcttcaggaagctaaacgtcagcatcagtctgactgtgtcgcgttcgaggtaacattgagtagatatcagcgggaggccgagcagtccaacgtggcccttcagcgggaagaagacagagttgaacaaaaggaagccgaggtgggagaactccaacggaggctgttagggatggagaccgagcatcaggcactgctggccaaagttcgggagggagaagtagccctcgaggagctgcgcagtaataacgccgattgtcaggccgagcgggaaaaagctgccacactagagaaggaagtggccggactgcgcgaaaagatccaccacctggatgatatgctgaagtctcagcagcggaaagtgcgccagatgatcgaacagctgcagaactccaaggcagtaatacaatccaaagacgcaacgatccaggaactgaaagaaaaaattgcttatctggaggctgagaacctggaaatgcacgaccgcatggaacacctgattgagaaacaaatttcacacggaaatttctcaacccaggcacgcgccaaaacggaaaaccctggaagcatcagaatcagtaagcctccatcacctaagcctatgcctgtgattcgcgtggtggaaact

SEQ ID NO: 20422 - DNA, 1170 bp, synthetic construct
  misc_feature 1..1170: note = source = /note="Description of Artificial Sequence: Synthetic coding sequence"
  source 1..1170: mol_type = other DNA
atgaacggaaccaggaattggtgtacgctggtggacgtgcaccccgaagaccaagcagctggatctgtcgatatcctcagactcactctccaaggcgaactcaccggagacgaactggagcacatcgctcagaaggccggccgtaaaacctacgccatggtctcgtcccatagcgctggccactccctggccagtgagctggttgagtcccacgatggccatgaggaaatcatcaaggtgtatctaaagggacggagcggggataagatgatccacgagaaaaatatcaaccaactcaaatccgaagtccagtatatacaagaggcaaggaactgcctgcagaagctgcgtgaagacatctcatcaaagcttgacaggaatctcggggactcccttcaccggcaggagatccaggtggtccttgaaaaaccgaacgggttctctcaatctccaactgcgctctacagttctccccctgaggtggacacctgtattaacgaagatgtcgagagtttaaggaaaacagtccaggatctgttggctaagctgcaagaggccaaaagacagcatcaatccgactgcgttgcattcgaggtgaccttgagcagatatcaaagggaagccgagcagtccaatgtggccctgcagcgcgaggaagaccgagtcgaacaaaaggaagccgaggttggcgaactgcaaaggagactgctcgggatggaaactgagcaccaggcactgctcgctaaggtgcgggagggtgaagttgccctggaagagctgagaagcaacaatgccgattgtcaggcagaaagagaaaaggcagccacgctggaaaaggaggtcgccggactgcgcgaaaagattcatcacctggacgacatgctgaagtcacagcagcgcaaggtccgtcagatgattgaacagctgcaaaactcgaaggctgtgatacagtcaaaggatgcaaccatacaggagctgaaagaaaagatagcgtacctagaagctgaaaacctggaaatgcatgatagaatggagcacctgatcgaaaagcagatttcccacggaaacttcagcactcaggctcgggccaagactgagaaccctgggagcattcgaatatctaaaccaccatcccctaagccaatgccagtgattcgggtcgtggaaacc

SEQ ID NO: 20423 - DNA, 1170 bp, synthetic construct
  misc_feature 1..1170: note = source = /note="Description of Artificial Sequence: Synthetic coding sequence"
  source 1..1170: mol_type = other DNA
atgaatggtacacgtaattggtgcaccctggtggatgtccatcctgaggatcaggccgcgggttcggtggatatcttgcgtctcacactacaaggagaactcaccggagacgaattggaacacatcgcccagaaggccggacgcaagacgtatgccatggtgtccagccacagcgccggtcatagtctggctagcgagctggtagaatcccacgatggccacgaggaaatcatcaaggtctatctgaagggccgaagtggcgataagatgatccacgagaaaaacatcaatcagctaaagtccgaagtgcaatatatccaagaggcccgaaactgcctccagaagctgcgtgaggatatcagtagcaagctcgatcgaaatctgggcgattctctgcaccgacaggaaattcaagtggtgcttgaaaaaccaaacggtttcagccagtcccctaccgcgctgtactcgagcccgcccgaggtggatacctgcattaacgaagacgtcgagagcttgcgaaagacagtgcaggacctcctagccaaactgcaggaggcgaaaaggcagcaccagtcagactgtgttgccttcgaagtcacgttgagccgttatcagcgcgaggctgaacaaagcaacgtggccctgcaacgtgaggaggacagagtggagcagaaggaagcggaggtgggagagctccagaggcgcttgttgggcatggagactgaacaccaagccctcctcgccaaggtgcgcgagggtgaagtggccttggaggagctgcggtccaataatgcggactgccaggcggaaagagagaaagccgccacgctggaaaaggaggtggcaggtctgagagagaagatccaccacttggacgacatgctgaagtcccagcaacgtaaggtgcggcagatgatcgagcaactgcagaactccaaagcggtgattcagtcgaaggatgctaccatccaggagttaaaggaaaaaatcgcctacctagaggccgagaacttggaaatgcacgataggatggagcatcttattgaaaagcagataagtcatggtaacttcagtacgcaggcgagagccaagacggagaaccccggatcgattcggatatctaaacctccaagcccgaaaccaatgccggtcatccgggtggtggagacc

SEQ ID NO: 20424 - DNA, 1170 bp, synthetic construct
  misc_feature 1..1170: note = source = /note="Description of Artificial Sequence: Synthetic coding sequence"
  source 1..1170: mol_type = other DNA
atgaacggaactcgtaactggtgcacccttgtggatgtgcacccagaagatcaagccgccgggagcgtcgatatcctgagactcaccctgcagggcgagctcactggtgatgaactggaacacatagcacaaaaggcggggcgtaagacctacgcaatggtcagctcacattcagcaggacattcactggccagcgaactggtagaatcccatgatggacatgaagagattatcaaagtgtacctgaaggggcgttcgggtgacaaaatgattcatgaaaagaacatcaatcagctgaagagcgaggtgcagtatatccaagaagcacggaactgtctgcagaagctgagagaggatatctcaagcaagctggaccgcaaccttggagactccctgcatcggcaggagatccaagtggtgctcgagaaaccgaatggtttctcgcagtcacccactgcactgtactcctcacctcctgaggtcgacacctgcatcaacgaggatgtggaaagcctgcgtaagacggtgcaagatctccttgcgaagctgcaggaagcgaaacgccaacatcagtccgattgcgtggcgtttgaggtcaccttgagccgttaccaaagagaggcagagcagtcgaacgtggctttgcaaagagaagaggaccgagtggaacaaaaagaggcagaagtgggcgaactccaacgacgattgctcggcatggaaacggaacatcaagcactccttgcaaaggtcagagagggagaggtcgcactggaagaacttcgcagcaacaatgcagattgccaggcagaaagagaaaaagctgctaccctcgaaaaagaggtggccggactccgcgaaaagattcatcatcttgacgacatgctcaagtcgcaacagaggaaggtgcggcagatgattgaacagctccaaaactcaaaagctgtcattcaatcgaaggatgcaaccatccaagagcttaaggagaagatcgcataccttgaggcagaaaatctggagatgcatgatagaatggaacacttgattgaaaagcaaatatcccacggcaacttcagcacgcaggctagagcaaagactgaaaacccaggctccattcgaattagcaaacccccttcgcccaagccaatgcctgtcatcagagtggtcgaaacc

SEQ ID NO: 20425 - DNA, 1170 bp, synthetic construct
  misc_feature 1..1170: note = source = /note="Description of Artificial Sequence: Synthetic coding sequence"
  source 1..1170: mol_type = other DNA
atgaacggaacgaggaattggtgcaccttggttgacgtccaccctgaagaccaagccgctggaagcgtggatatcctgcggcttacactgcagggcgaactgaccggggatgagctggaacacatcgcccagaaagcaggaagaaagacatacgcaatggtgtcctctcattcagccggtcatagcctggcatctgagctggtcgaatctcacgatgggcatgaagaaatcattaaggtgtatctcaagggtaggagtggcgacaaaatgattcatgaaaaaaatattaaccaactgaagtcggaagttcagtatatccaggaggctcggaattgcctgcagaaactgcgggaagacatctcttcaaaactagataggaatctgggagactcgcttcataggcaagaaatacaggttgttttggagaaacccaacggattctcacagtctccgacagcactgtatagcagccctcctgaagtggatacatgcattaatgaggatgtcgagtcattacgcaagacagtccaagatcttctggctaaactgcaggaagctaaacggcagcaccaatcagattgtgtggcgttcgaagtgactttgtcacgctaccagcgcgaggcagagcaaagtaacgtcgctctgcagagggaagaggatcgggtcgagcaaaaggaagctgaagtgggagaactgcagagacgcctgctgggcatggagactgaacaccaggcccttctggccaaggtgcgggaaggagaagtcgccctggaggagctcagatctaacaacgcagattgccaagcagagcgtgaaaaggccgcgacattggagaaggaagtggccgggctgcgggagaagattcaccacttggacgacatgctgaaatcccagcagaggaaagttaggcagatgatcgaacagctgcagaacagcaaagcggttattcagtccaaagatgccaccatacaggagctgaaagaaaagattgcttatctggaggcagagaacctggagatgcatgatagaatggagcaccttatagagaagcaaatctctcacgggaattttagtactcaggcgcgagcaaaaaccgagaaccccgggtccatcaggatctctaagcccccctccccgaaacctatgcctgtgatcagagtagttgagacc

SEQ ID NO: 20426 - DNA, 1170 bp, synthetic construct
  misc_feature 1..1170: note = source = /note="Description of Artificial Sequence: Synthetic coding sequence"
  source 1..1170: mol_type = other DNA
atgaatggaactcggaattggtgtacgctcgtggacgtgcacccggaggaccaagctgccggatccgtggacatcctccgactgacccttcagggagagctgaccggagacgagctcgaacatattgcgcagaaggccggtcggaaaacctacgccatggtgagctcccactcagcgggacattccctggcctcggaactggtggagagccatgatggacatgaagaaatcatcaaggtgtacctgaagggaaggagcggagataagatgatccatgagaagaatatcaatcagctcaaaagcgaggttcagtacattcaagaagctcggaactgcctgcagaagctgagagaagatatctcgtccaagctggacagaaatctgggtgactcactccatcgccaggaaatccaagttgtgttggaaaagccgaacgggttctcgcagtccccgaccgccctttactcatccccgccagaagtggatacctgcatcaacgaggacgtggagtcactgagaaagactgtgcaagatctgctggcgaaacttcaagaggcgaagaggcagcaccaatcggactgcgtggccttcgaggtcaccctgtcacgctaccagcgggaagccgagcagtcgaatgtggcactccagcgcgaagaggatcgggtggagcaaaaggaagcggaggtgggcgagctccagagacgactcctgggcatggagactgagcaccaggccttgttggcaaaggtcagggaaggagaggtcgcgctggaagagctccggtcaaacaacgcggattgccaggcagagcgagaaaaggccgccactctggagaaggaagtggcggggcttcgtgagaaaatccatcatctcgatgacatgctgaagtcacagcaacggaaggtgaggcaaatgattgaacaactccaaaacagcaaggccgtgatccagtcaaaggacgccaccatccaggaactcaaggagaagatcgcctacctcgaagcggaaaacctggaaatgcatgataggatggaacacctgattgagaaacaaatttcccacgggaacttctcgactcaagctcgcgcaaaaaccgaaaaccctggctccattagaatctcgaagccgccatcgcctaaacctatgccggtgatccgggtcgtggagact

SEQ ID NO: 20427 - DNA, 1170 bp, synthetic construct
  misc_feature 1..1170: note = source = /note="Description of Artificial Sequence: Synthetic coding sequence"
  source 1..1170: mol_type = other DNA
atgaacggaactagaaactggtgtactctggtggatgtgcatccggaagatcaagcagcgggatcggtggatatcctgcgcctcaccctgcagggcgaactgacgggagacgagttggaacacatcgcccagaaggctggccggaaaacctacgccatggtgtcgagccatagcgcgggccacagcctcgccagcgagctggtcgagtcgcatgacggacatgaagagattatcaaggtctacctgaaagggcggtccggtgacaagatgattcacgagaagaacatcaaccagctcaagtccgaggtgcaatacatccaagaggcacgcaactgcttgcaaaaactcagggaggacatcagctccaagctggatcgcaacctgggagattcgcttcatagacaagagatccaagtcgtgctcgaaaagccgaacggcttctcccagtcgccgactgccctctactcgtccccaccggaggtggatacctgcataaacgaggacgtggaatccctgaggaaaactgtccaggacttgctggccaagctgcaggaagctaagcgccagcatcagagcgactgtgttgctttcgaggtgactctgtcccggtaccaacgcgaggcggagcagtctaatgtggccctgcaacgggaggaagatcgcgtggaacagaaggaggccgaggtgggggaactgcagagacggcttttgggcatggagactgagcaccaggccctcctcgccaaagtgagagaaggagaagtggccctggaggaactgcggtcaaacaatgccgactgtcaagcggagcgcgaaaaggcggccaccctcgagaaagaagtggccggacttcgcgaaaagatccaccatctggacgacatgcttaagtcgcagcagagaaaggtccggcaaatgattgagcagcttcaaaatagcaaggcagtgatccagtcgaaagatgccaccatccaggaactgaaggaaaagatcgcctacctggaggccgagaacctcgagatgcacgacagaatggagcacttgatcgagaagcagatctctcatggaaatttcagcacccaggccagagccaagaccgaaaacccgggatccattcggatctccaagccaccctcgccgaagccgatgcctgtgatccgggttgtggaaact

SEQ ID NO: 20428 - DNA, 1170 bp, synthetic construct
  misc_feature 1..1170: note = source = /note="Description of Artificial Sequence: Synthetic coding sequence"
  source 1..1170: mol_type = other DNA
atgaacggtacgcgcaattggtgcactctcgtcgacgtccaccctgaagaccaagccgcaggttcagttgacatactcaggctaaccctgcaaggcgagcttactggcgacgagctggagcacatcgctcaaaaagccggccggaagacatacgcaatggtgagctcccattccgcagggcactccctcgcgtccgagttagtggagtctcacgacggacatgaagagattattaaagtctatctaaaaggcagatcaggagacaagatgatacacgagaagaatattaaccagctcaagagcgaggttcagtacatccaggaagctcggaattgtctgcagaaacttagagaggacatctcatcgaagttggatcggaacttgggcgatagcctgcatcgtcaggagatccaggtggtgctcgagaaacccaacggcttttcacagagcccgaccgccctttactcaagtcccccagaggtggacacatgtattaatgaagatgtggagagtctgaggaaaacagttcaggaccttctggccaaactccaggaagctaagaggcagcaccaaagcgactgcgttgcattcgaagttacgctgagtaggtaccagcgcgaggctgagcaatccaatgtggctctacaacgagaggaagacagagtggaacagaaagaagcagaggtcggggaattgcagaggcggttattggggatggaaaccgagcaccaggccctgctggccaaggttagagagggagaggtggccttggaggagttacgttccaacaacgcggactgccaggccgagagagaaaaagcagccacgttagaaaaagaagtggccggcctccgtgaaaaaatccatcatctcgacgatatgctgaagagtcagcaaagaaaagtgcggcagatgatagaacagctgcaaaactctaaggcggtaatccaatcaaaggatgctacaatccaggagttaaaggagaaaattgcgtacctcgaagccgaaaatctggagatgcatgacagaatggagcatctgatcgaaaagcaaattagccacggcaatttctccactcaggcacgggccaaaaccgaaaatccgggcagtatacgaataagcaagcctccctccccgaagcccatgcccgttattcgagtcgtcgagact

SEQ ID NO: 20429 - DNA, 1170 bp, synthetic construct
  misc_feature 1..1170: note = source = /note="Description of Artificial Sequence: Synthetic coding sequence"
  source 1..1170: mol_type = other DNA
atgaacggcacgcggaactggtgtactctcgtggatgtccacccagaagatcaggctgcaggatcggtcgacatcctccggctgacccttcaaggcgaactgacgggagacgaactcgaacacattgcccaaaaggcagggcgaaagacctacgcaatggtgtccagccacagcgccggacattcactcgcgtcagagcttgtggagtcgcacgatgggcatgaggagattatcaaggtgtacctgaaaggtcgctccggagataagatgatccatgagaaaaacatcaatcaactcaagtccgaagtgcagtacattcaagaggcaagaaactgtttgcagaagttgagagaagatatctcgtcgaaactggaccggaatttgggcgattcacttcaccgccaagagatccaggtggtgctggaaaaacctaacggattcagccaaagcccaaccgccctttacagctctcctcctgaagtggatacctgtattaacgaagatgtggaaagcctgcgcaagaccgtgcaggacctgctggcaaagctgcaagaagccaagcgccagcaccaaagcgattgcgtggcatttgaagtcactctgtcgcgctaccaaagagaggcggagcaatcgaacgtcgcgcttcaacgagaagaagatcgcgtcgagcagaaggaagctgaagttggagaacttcagaggagactgcttgggatggagactgaacaccaagctcttctggcaaaagtgagagagggagaagtggcgctggaagaactcaggtcaaacaatgcagattgccaagccgaaagagaaaaagcagcgacgctcgaaaaggaagtggcaggcctcagagaaaagatacatcatcttgatgatatgctgaagtcgcagcaacgtaaagttcggcaaatgattgaacagcttcagaattcgaaggcagtgatacagtctaaagatgcgaccattcaggagcttaaagaaaagattgcgtatttggaagcggaaaacctggaaatgcatgataggatggaacacctcatcgagaaacaaatttcgcacggtaacttttccacccaggcacgtgcaaagaccgaaaatcctggttcaatcaggatttccaaaccaccttccccaaagccaatgcctgtgatacgtgtggtggaaact

SEQ ID NO: 20430 - DNA, 1170 bp, synthetic construct
  misc_feature 1..1170: note = source = /note="Description of Artificial Sequence: Synthetic coding sequence"
  source 1..1170: mol_type = other DNA
atgaatggtacaagaaattggtgcacgttggttgatgtgcatccggaagatcaagcagcgggatcagttgatattttacgtcttacgctacagggggaactgacgggggatgaactcgagcacattgctcaaaaagcggggaggaaaacgtacgccatggtctccagccatagcgctggtcattctttagcctcagagttggtagaatcgcatgacggacacgaagaaatcattaaagtctatctgaagggaagatctggcgacaagatgattcacgaaaaaaatattaaccaattaaaaagcgaggttcagtatatccaggaggccagaaactgcttacagaaattacgggaggatatctcctctaaacttgaccggaacttaggcgacagtctgcatcgacaggaaattcaggtggtgcttgaaaaaccgaatggtttttctcagtcaccgactgctctgtatagctcgcctccggaagttgatacatgcattaatgaggatgtggaatcacttagaaagacagttcaggacctccttgccaaacttcaggaggccaagcgtcaacaccagtccgattgcgttgcttttgaagttacactgtctagatatcagcgggaagcggaacaatccaatgtcgcgctccagagagaggaagaccgagttgagcagaaagaagccgaggtgggtgaattgcaacgtagattgcttggcatggaaacagagcaccaggcacttctggcgaaagtgcgtgagggggaggtcgcattggaagaactgcgtagtaacaacgcggattgtcaagcggagcgggaaaaggcagcgactctggaaaaagaagttgccggtctaagagagaaaatccatcatttagatgatatgctcaaatctcaacagcgcaaagttcgccagatgattgaacaacttcagaatagtaaagcagttatacagagcaaagatgctacgatacaagagctgaaagagaaaattgcttacttagaagcggaaaacctggagatgcatgaccgaatggaacatttaattgagaagcagatttctcacggcaatttttctacacaggcacgcgcgaaaacagagaatcccggtagtattcggattagtaaacccccgtctccgaagcctatgccggtaatacgcgttgtcgaaacg

SEQ ID NO: 20431 - DNA, 1170 bp, synthetic construct
  misc_feature 1..1170: note = source = /note="Description of Artificial Sequence: Synthetic coding sequence"
  source 1..1170: mol_type = other DNA
atgaacggtaccaggaactggtgcacactagtggacgtgcatcctgaagatcaagccgctggctccgtggatattctgagactgactctgcaaggagagctgactggggacgagttggagcatatcgcacagaaggcaggacgcaagacatacgccatggtttcatcgcatagtgccggacatagcctggcctccgaactggtggagagccacgatggacacgaggagataatcaaggtctatctcaagggaaggagcggagataaaatgattcatgaaaaaaatattaaccagctcaagtccgaagtgcagtatattcaggaggccagaaattgtttgcagaaactccgcgaggacatcagtagtaaactcgacaggaatcttggagattcactccacaggcaggaaatccaggtcgtactggagaagcctaacgggttcagccagagcccgacagctttatatagttctcccccagaggtagacacctgtattaatgaggacgtggaaagcttaaggaaaacagtacaagacctgttggctaaactgcaggaagccaaaaggcagcatcagagcgattgcgtggctttcgaggtgaccttatcgcggtaccaacgtgaagcggaacagtccaacgtcgccttgcaacgggaggaggatagagtcgagcagaaagaggctgaagtgggagaattgcagcgtagactccttggcatggagacagagcaccaggcactcctggctaaggtgcgcgaaggtgaagtcgcactcgaagagctgagaagcaataatgcagattgccaggcagaacgggaaaaggccgccaccctagagaaggaagttgccggcctgcgagagaagatccaccaccttgatgatatgctgaaatcccagcagagaaaagtgcggcaaatgatagagcagctgcagaattcgaaagccgtgatccagtccaaagacgccacaattcaggaattgaaggaaaaaatcgcatatcttgaagccgaaaacctggagatgcatgataggatggaacatttgattgagaaacagattagccatggcaacttctctacacaggcacgagcaaaaaccgagaatcctggatctatcagaatttctaagcctccaagcccaaagcctatgccagtgatcagagtcgtcgaaaca

SEQ ID NO: 20432 - DNA, 1170 bp, synthetic construct
  misc_feature 1..1170: note = source = /note="Description of Artificial Sequence: Synthetic coding sequence"
  source 1..1170: mol_type = other DNA
atgaacgggactagaaattggtgtactctggtggatgtgcaccccgaggaccaggctgccgggtcagtcgacatattgcggcttacccttcagggtgaactgaccggtgatgaactcgaacacattgcgcagaaggccggaaggaaaacgtatgccatggtgagctctcattcggcaggacattcgctggcttctgaacttgtggaatcccacgacggccatgaggagatcattaaggtgtacctcaaaggacggtcgggtgacaaaatgattcacgaaaagaacatcaatcaacttaagtccgaagtccaatacattcaggaagcacgtaactgtctgcagaagctgcgtgaggatatctcgtctaagctggatagaaacctgggggactccctccaccgccaagaaatacaagtcgtgcttgaaaagcccaacggcttctcgcagagccctactgccctttactcgagcccaccagaagtggatacctgtataaacgaggatgttgaaagccttcgcaagacggttcaggatctccttgcgaagctgcaagaggccaagaggcaacatcaatcagattgtgtggcttttgaagtgacgctgtcccggtaccaacgggaagcagaacaaagcaatgtggcactgcagagagaggaggatcgcgtggaacaaaaggaggcagaagtcggcgaacttcaacggagattgttgggaatggaaaccgagcatcaggcactcctggcgaaggtgagagaaggtgaagtggccctggaagaactgcgttccaacaacgccgactgccaggcagaacgggaaaaggcagccactttggagaaagaagtggctggactcagagaaaagattcatcatctggatgatatgcttaaatcacagcagcggaaggtccggcagatgatagaacagctgcaaaattccaaagcggtgatccagagcaaggatgctaccattcaggagctgaaggaaaagattgcctaccttgaggcagaaaaccttgagatgcatgacaggatggaacatcttattgaaaagcagatttcgcatgggaacttttctactcaagccagggcaaagaccgagaacccaggctccatccggatttccaagcctccttcacctaagcctatgccggtgatcagagtggtggaaact

SEQ ID NO: 20433 - DNA, 1170 bp, synthetic construct
  misc_feature 1..1170: note = source = /note="Description of Artificial Sequence: Synthetic coding sequence"
  source 1..1170: mol_type = other DNA
atgaacggtactagaaactggtgtacccttgtggatgtccatcctgaggaccaggccgcaggtagcgtcgatatacttcggctcactttgcagggagaactcaccggagatgaacttgaacatatcgcacagaaggctggtcgaaaaacctacgcaatggtttcaagccattcggcaggacattcactggcatccgagctggtggaaagccatgatggccacgaagagatcatcaaagtgtacctgaaaggacggtcaggtgataagatgattcatgaaaagaacattaaccaacttaaaagcgaagtgcaatacatacaagaggcaagaaattgtctgcaaaagctgcgagaggacatctcatccaagctggataggaaccttggagattcgctccatagacaagagatccaggtggtccttgaaaagccaaatgggttttctcaatccccaacggcgttgtactcgagtccacctgaggtggatacttgcatcaacgaagatgtggaatcgcttagaaagaccgtgcaagaccttctcgccaaactgcaagaagcaaagagacagcatcagtcagattgcgtggcattcgaagtcacgctttctcgataccaacgcgaggcagagcagtcgaacgtggcacttcaacgcgaagaagatagagtagagcaaaaggaagcagaagtcggagaacttcagcgcagacttctgggtatggaaaccgaacaccaggcactgcttgctaaggtgcgagagggagaagtggcactggaagaactgagatcgaataatgccgactgtcaagcggaacgagaaaaggcagccactctggagaaggaggtggcaggattgagggaaaagatccaccatcttgatgacatgttgaagtcccaacaaagaaaggtgagacagatgattgagcaactgcagaacagtaaggccgtcatccagagcaaggacgcgactattcaagagctgaaagagaagattgcctaccttgaggcagaaaatcttgaaatgcacgacagaatggaacatctgattgaaaaacaaatttcgcatggtaacttcagcacccaggcgcgtgccaagactgaaaaccctggttcgattagaatctcgaagcctccttcacccaagcctatgccagtcattcgcgtcgtggaaacc

SEQ ID NO: 20434 - DNA, 1170 bp, synthetic construct
  misc_feature 1..1170: note = source = /note="Description of Artificial Sequence: Synthetic coding sequence"
  source 1..1170: mol_type = other DNA
atgaacggcacgcgaaactggtgcaccttggtcgatgtgcacccggaggatcaagctgccggttcggtcgacatcctgcggctgaccctccagggtgaactcaccggggacgaactggaacatatcgcccagaaggccggaagaaaaacctacgctatggtcagctcacactcggccggacactcgctcgcctcggagttggtcgagtcgcacgatggccacgaagaaatcatcaaggtgtacctgaagggccgctccggggataaaatgatccatgagaagaacattaatcaactgaagtcagaagtgcagtacattcaggaggcgcgcaactgcctgcaaaagctgagagaggacatctccagtaagctcgatcggaaccttggagactcactgcatcggcaggaaatccaggtggtgttggagaaaccgaatggatttagccagtccccgactgctctttactccagccctccagaggtggacacttgcatcaatgaggatgtggaatcgctgcgcaagactgtccaagacctcctggccaagctccaagaggcaaagcggcagcaccaatccgactgcgtggccttcgaagtgaccctgagccgttatcagcgggaggcggaacagtccaacgttgcccttcagagagaggaggatagggtcgagcagaaagaagcagaggttggagaactgcaacgcagacttctggggatggaaactgagcaccaggcgctgttggcaaaggtccgcgaaggagaggtagcactcgaagaactgaggagcaataacgcggactgtcaggctgaacgagaaaaggcagccactctcgaaaaggaggtggctggactgagagaaaaaatccatcatctggacgacatgctgaagtctcaacagcggaaagtgcgccagatgatagagcagctccagaactcaaaagcggtgatccagtcgaaagacgccacgatccaagagctgaaggaaaagatcgcctacctggaagcggagaatctcgaaatgcacgatcgcatggaacatctcatcgaaaagcaaatttcccacggcaatttctcaacccaagcgcgggcaaagactgagaacccgggatcgattaggatcagcaaaccaccctctccaaagccgatgcctgtgatccgcgtggtggaaacc

SEQ ID NO: 20435 - DNA, 1170 bp, synthetic construct
  misc_feature 1..1170: note = source = /note="Description of Artificial Sequence: Synthetic coding sequence"
  source 1..1170: mol_type = other DNA
atgaacggaacccgcaactggtgcacccttgtcgatgtgcatccggaggaccaggccgctgggtccgttgacatcctccggctgacccttcaaggtgaactgactggcgacgaattggaacacattgcacaaaaggcgggtcgaaagacttacgcaatggtcagttcgcattccgcgggacactccctggcaagcgagctggtggaatcgcacgatggacacgaggagataatcaaagtgtacctgaagggcagatccggagacaagatgatccatgaaaagaacataaatcagcttaagtcggaagttcagtacatccaggaagcccgcaactgccttcagaagctgagggaggatattagctcgaagctggaccgcaatctgggagattccttgcaccggcaggagatccaagtggttctcgagaagccaaacgggttctcgcaaagccccaccgccttgtactcatcgccccctgaggttgacacctgtatcaacgaggacgtggaaagcctccgaaaaactgtccaggatctccttgctaagctccaagaggcaaagcgccagcatcagagcgactgcgtcgcgttcgaagtcactttgtccagataccaaagggaggctgagcaatcgaatgtggcgctccagcgcgaggaggaccgggtcgagcagaaggaagcggaggtgggcgagctgcagcggcgcctgctgggtatggaaacggaacaccaggcacttctggccaaggtccgggaaggggaagtggcgctggaggaacttcggtccaacaacgctgattgtcaggcagagcgtgagaaggctgccactctggagaaggaagtcgctggcctgcgcgaaaagatccaccacctcgatgacatgctcaaaagccaacaaaggaaggtcagacagatgatcgaacagctgcaaaattccaaggcagtgatccagtccaaagatgctaccatccaagaactgaaggagaagatcgcatatctggaggctgagaacctggagatgcatgatcggatggaacacctgattgaaaaacagatcagccatggaaatttctccacgcaggcgcgggccaagacggaaaaccccggatcaatcagaatttcgaagccgccaagccctaaaccaatgcctgtcatcagagtggtggaaacc

SEQ ID NO: 20436 - DNA, 1170 bp, synthetic construct
  misc_feature 1..1170: note = source = /note="Description of Artificial Sequence: Synthetic coding sequence"
  source 1..1170: mol_type = other DNA
atgaatggcacccgaaactggtgtaccctggttgatgtgcatcccgaagatcaagcagccggatcggtggatattcttcgccttacccttcagggtgagctgacgggtgatgagctggagcacatcgcccagaaggctggtcgtaagacttacgcaatggtatcatcgcactccgccgggcacagcctggcatcagaacttgtggaatcgcacgacggtcatgaggagatcattaaggtgtacctcaagggtcgctccggggataagatgatccatgaaaagaatatcaaccaactgaagtcagaagtgcagtacattcaggaagcaagaaactgtctgcaaaagttgagggaggacatatcgtcgaaactggaccgtaaccttggagattcgctgcataggcaagaaattcaagtggtgcttgaaaaacctaacggcttctcgcagagccctactgcgctgtacagctccccaccggaagtcgacacctgcattaacgaggacgtcgagagccttagaaagaccgtgcaggatcttctcgcaaaacttcaggaagccaagagacagcatcagtccgactgtgtcgcgtttgaagtgaccctgagccggtaccagagggaagcggaacagtcgaacgtggcactgcagcgtgaagaggaccgcgtcgagcaaaaggaggctgaagtgggcgaacttcaacggagactgctgggcatggaaacggagcaccaagcacttcttgcaaaagtgagagaaggagaggtggcattggaggaactgagatccaacaacgcagattgccaagccgagcgcgaaaaagcggcgactcttgaaaaggaggttgcaggcttgagggaaaagatccatcatctcgatgacatgctgaaatcccaacaacgcaaggtgagacaaatgatcgaacaactgcagaactccaaggcagtgattcagagcaaggatgcaaccattcaagaacttaaggagaaaatcgcatacctcgaagccgaaaaccttgaaatgcacgataggatggaacaccttattgagaagcagatttcccacggtaatttcagcactcaagccagagccaaaaccgaaaacccaggaagtattcgtatctccaagccaccatctccaaagcccatgcccgtgatccgggtcgtggaaacc

SEQ ID NO: 20437 - DNA, 1170 bp, synthetic construct
  misc_feature 1..1170: note = source = /note="Description of Artificial Sequence: Synthetic coding sequence"
  source 1..1170: mol_type = other DNA
atgaatggaacaagaaattggtgtactttagtagatgtacatccagaagatcaagcagcaggtagtgtagatattcttagactaactcttcagggggaattaacaggagatgaattagaacatattgctcaaaaagcaggtagaaagacatatgctatggtctcaagtcatagtgctggacattctcttgcttccgaacttgttgagagtcatgatggtcatgaagaaataattaaagtttatttgaaaggaagatcaggagataaaatgattcatgaaaaaaatataaatcaattaaaatcagaggtccaatatattcaagaagcaaggaattgtttgcaaaaacttcgtgaagatattagtagtaaattagatcgtaatcttggagattctttacatcgtcaagaaattcaagttgtccttgaaaaaccaaatggattttctcaatcaccaactgcattatattcttcacctccagaggttgatacttgtattaatgaagatgttgaaagtcttagaaagactgtacaagatttattagctaaattgcaagaagctaaaagacaacatcaatctgattgtgttgcttttgaagtaacattatcacgttaccaaagagaagctgaacaatctaatgtagctttacaaagagaagaagatagagttgaacaaaaagaagcagaagttggagaacttcaaagaagattacttggaatggaaacagaacatcaagctctattagctaaagtacgagaaggtgaagttgctttagaagaattaagatcaaacaatgctgattgtcaagcagaaagagaaaaagcagcaactcttgaaaaagaagtggctggtcttagagaaaaaattcatcacttggatgatatgttaaagtcccaacaaagaaaagtaagacagatgattgaacaattacaaaatagtaaagctgttattcaatctaaggacgctactatccaagaattaaaagaaaaaattgcttacttagaagcagaaaaccttgaaatgcatgatagaatggaacatcttattgaaaaacaaatttctcatggaaattttagtacacaagcaagagcaaaaactgagaatcctggatcaatcagaatatcaaaaccaccttcaccaaagccaatgccagttattagagttgttgaaact

SEQ ID NO: 20438 - DNA, 1170 bp, synthetic construct
  misc_feature 1..1170: note = source = /note="Description of Artificial Sequence: Synthetic coding sequence"
  source 1..1170: mol_type = other DNA
atgaacggaactcggaattggtgtactctcgtagatgtccatcccgaggatcaggccgctggatctgtggatatcttacggttaactctgcagggggagctaacaggggatgaactggagcatatagcacagaaagccggacggaaaacatacgctatggtctcgagtcacagtgccggacattcccttgcgtccgaactcgtggaatcacatgacgggcatgaggaaataattaaagtctacctcaaagggagatcaggagataaaatgatacacgaaaaaaacataaaccaactaaaaagtgaagtgcagtacatacaggaagccaggaactgcctgcagaaacttcgcgaagatatatcttccaaactcgataggaatctcggagattccctacatagacaggaaatacaggtagttttggaaaagccaaatggattctcacagtctcccactgctctctacagttcaccccctgaagttgatacatgcatcaacgaagacgtagaatccctccggaagacagtccaggatctattagcaaagttgcaagaagctaaaaggcagcatcagagtgattgtgtggcttttgaagtaacactgtctaggtatcagcgggaggccgaacaaagtaacgtcgccctacaacgtgaggaggatcgcgtcgaacagaaggaggccgaagtgggagagctccagagacggctgcttgggatggaaacagagcatcaggcactgctcgctaaagttcgcgaaggggaggtggctctagaggaactgaggtccaacaatgcagattgccaggccgaacgggagaaagctgcgacgctcgaaaaagaggtagccggacttagagaaaaaatacatcacctggatgatatgctcaaaagtcagcagcgcaaagtacgccagatgattgaacagctgcagaattctaaagccgtcatccagtctaaagacgctacaatccaggaactgaaagaaaagatagcctatctagaagccgaaaatctagaaatgcacgataggatggaacatcttatagaaaaacagatctctcatgggaatttttctacacaggcaagggccaaaacagagaatcccggatccatacgaatctctaaacccccaagtcctaaacctatgccggtgatcagagttgtggagaca

SEQ ID NO: 20439 - DNA, 1170 bp, synthetic construct
  misc_feature 1..1170: note = source = /note="Description of Artificial Sequence: Synthetic coding sequence"
  source 1..1170: mol_type = other DNA
atgaatggcacccgcaattggtgtaccttggtggacgtgcaccccgaggatcaggccgctggctcggttgacatcctgagactgaccctgcagggcgaactgactggcgacgagctggagcacattgctcagaaagcgggccgcaagacctacgctatggtcagtagccacagcgccggccacagcttagccagcgaactagttgagagccacgatggccacgaagagattatcaaagtttatctgaagggtcgatctggtgataaaatgatccatgaaaagaacatcaaccagctgaaaagcgaggtccaatacatccaggaggctcgcaactgcctgcagaaactgcgcgaagatattagctctaagctcgacaggaacctgggggatagcctgcaccgtcaagagatccaagtcgtgttggagaaaccaaacggcttttctcagagcccgacagcgctgtatagctcaccgcctgaggttgacacttgcatcaatgaagacgtggagtccctgcgcaaaaccgtgcaggacctgctggccaagctgcaagaagctaagcgccagcaccagtccgattgtgtggccttcgaagtgaccttatctcgctaccagcgtgaggcggagcagagcaatgttgccctgcaacgcgaagaggaccgcgtcgaacaaaaggaagccgaggtgggtgaactccagcgtaggttgcttggcatggaaaccgagcaccaggccctgctggcaaaagtccgcgagggtgaggtcgcactggaggagttgcgttccaacaatgccgactgtcaggccgaaagagaaaaagcggcaaccctggaaaaggaggtggcaggtctacgcgaaaagatacatcacttggacgatatgctgaagtcacaacagcgtaaggtccgccagatgatcgaacaactccaaaatagcaaagctgttatacagagcaaggatgcaacaatacaggagctgaaggagaagatcgcatacctggaagctgagaacctggagatgcatgatcgcatggaacacctgatcgagaaacagattagccatggtaacttctctacccaagcccgcgccaaaactgaaaacccagggtctatcagaatctctaaaccgccgagcccaaagccaatgcctgtgattcgtgtggttgaaacc

SEQ ID NO: 20440 - DNA, 1170 bp, synthetic construct
  misc_feature 1..1170: note = source = /note="Description of Artificial Sequence: Synthetic coding sequence"
  source 1..1170: mol_type = other DNA
atgaatgggacccggaactggtgcacactagtggatgtgcatcctgaagatcaggccgcgggctccgtcgatattctccggttgactcttcagggggaattgactggagacgaactcgagcacatagcccagaaagccggccgaaagacctatgcgatggtgtcctcccactcagctggccactccttggctagtgagctcgtggagtctcatgacggtcacgaggaaatcatcaaagtatatctgaaggggaggtccggcgataaaatgatccatgagaagaacataaatcaattaaagagtgaagtacagtatatccaggaagcccgaaactgcctccaaaagctgcgggaggatatcagcagcaaactagatcggaatctcggggatagtctgcatagacaggaaatccaagtggtgttagaaaagcctaatggattttcacagagccccacggcactttacagtagcccgcctgaagttgatacctgtattaatgaggacgtggagtccttgagaaagacggtccaggatcttctggccaaactgcaggaggccaagcggcagcaccagagcgattgcgtcgcatttgaggttacactcagtcgatatcagcgggaagccgagcagtcgaatgtagcgctgcagcgtgaggaggacagggttgaacagaaagaagcagaggtaggcgagttgcagcgacgtctgctgggaatggagacagaacatcaggcccttctggccaaggtgcgtgagggagaggtggcacttgaagaacttcgctccaacaatgcagattgtcaagcagagagagaaaaagccgctaccctcgagaaggaggtggccgggctgcgggaaaaaatccaccacctggatgacatgttgaaatcccagcaaagaaaagttagacagatgatagaacagctccagaactcgaaggcggtgatccaaagcaaagatgctacaatacaggaactcaaggagaaaatagcctacctggaagctgaaaacctggagatgcacgacaggatggagcatctgatcgagaagcagatatctcacggcaatttctcaacccaggcgagagctaaaactgagaaccctggttccattcggatctctaagccaccaagcccgaagccgatgcctgtgatcagggtagttgagaca

SEQ ID NO: 20441 - DNA, 1170 bp, synthetic construct
  misc_feature 1..1170: note = source = /note="Description of Artificial Sequence: Synthetic coding sequence"
  source 1..1170: mol_type = other DNA
atgaatggaaccagaaattggtgcaccctggtggatgtacatccggaagatcaggcagctggtagcgtcgatatattaaggcttaccctccaaggtgagctgaccggggatgagctggagcacatcgcacagaaagcaggcagaaaaacttatgcaatggtaagcagccattctgcaggtcacagccttgctagcgaactggtcgaatcccacgacggccacgaagaaatcatcaaagtgtacttgaagggtcgttctggtgacaagatgatccatgaaaagaacatcaatcagctgaagtccgaggtacagtacatccaggaggcccgcaactgtctccagaagttgcgagaagatatttcatctaaattggatcgcaatctgggggattccttgcacagacaagagattcaagtcgtgttggaaaagccgaacggcttcagccagtcacccacagccttgtactcttcacctccggaagttgatacatgcatcaacgaggatgttgagtccctccgaaaaacggtccaagacttgttggcaaagttgcaagaggctaagaggcagcatcagtccgattgtgttgcatttgaggttacactgtccagatatcagagggaagctgagcagtccaatgtcgctttgcagagggaggaggatagggtcgaacagaaagaggcagaggtgggagaactccagagacgcctgctgggtatggagaccgaacatcaggccctactcgccaaagtacgggaaggcgaggttgccctcgaagagctgcgcagcaacaacgctgattgtcaggctgaaagagaaaaggcagcgacgctcgagaaggaggtggctggcctgcgggaaaagatccatcacctcgatgacatgctgaagtcacaacagcgcaaggtgcgtcagatgatcgagcagctgcagaatagcaaggcggtaatccagagtaaagacgcgaccattcaggaactgaaggaaaagatcgcctatcttgaagcagaaaacctggagatgcatgacagaatggagcacctgattgagaagcagatttcccacggcaacttttcgacccaggccagggccaagaccgagaatccgggctctataagaatttctaagcccccttcgcccaaacctatgccagtgatccgcgtggtagaaacc

SEQ ID NO: 20442 - DNA, 1170 bp, synthetic construct
  misc_feature 1..1170: note = source = /note="Description of Artificial Sequence: Synthetic coding sequence"
  source 1..1170: mol_type = other DNA
atgaatggaaccagaaattggtgtacccttgtggacgtgcatccagaagatcaagccgcaggctcggtcgatatccttcgtttgacgctgcaaggtgaactcaccggagacgaactggaacatattgcacaaaaggctggaagaaaaacttacgcaatggtgtcctcacactcagccggtcatagcctggcatcagaacttgttgaatcccatgatggacatgaagagattatcaaagtctacctcaaaggaaggtcgggcgataagatgatacatgagaagaacattaaccaactgaagtccgaggtccagtatattcaggaggcacgaaactgccttcaaaagttgcgcgaagatatctcatccaaactcgatagaaatctgggagattcccttcatcgacaagaaatacaggtggtgctcgaaaagcctaacggattctcccaatcaccaactgcactgtacagctcaccacccgaggtcgatacgtgcattaacgaggatgtcgagtccctccgaaaaactgtgcaggatctgctcgcaaaactgcaagaagcgaagcggcaacatcaaagcgattgtgtggcatttgaggtcacccttagccgttaccaacgggaagcagaacaaagtaatgtggcgcttcaacgcgaagaagatcgagttgagcagaaagaagcagaagtgggcgaactgcagcgccggctgcttggaatggaaaccgaacatcaagctctgttggcgaaggtgcgagagggtgaagtcgcactcgaagaacttcggtccaacaacgcggattgccaagcggaaagagagaaggccgcgactcttgaaaaggaagtggccggacttcgggagaagatacatcacttggacgacatgcttaagtcgcagcagcgaaaggtgcggcagatgattgaacaactgcaaaacagcaaggcggtcattcagtccaaagatgccaccatccaagagttgaaagagaaaatcgcatacctcgaggcggagaaccttgaaatgcacgacaggatggaacaccttattgagaaacaaatcagccatggcaacttttcaactcaagcacgggcaaagactgagaaccctggttcgatcagaatctcaaagcccccaagccctaaacctatgccggtcattcgtgtggtggaaacc

SEQ ID NO: 20443 - DNA, 1170 bp, synthetic construct
  misc_feature 1..1170: note = source = /note="Description of Artificial Sequence: Synthetic coding sequence"
  source 1..1170: mol_type = other DNA
atgaatgggaccaggaactggtgcacccttgtcgacgtccaccctgaagatcaggctgcgggctcggtcgacattctccggctcactctgcagggagaactgactggagacgagttggagcacatcgcgcagaaggccggccgaaaaacttacgccatggtgtcctctcacagcgcaggacattcactcgcttcggaactcgtggagtcccatgacggccatgaggaaatcattaaggtctacttgaagggacgcagcggggataagatgatccatgaaaagaatatcaatcagcttaagagcgaagtccaatacatccaagaagcaagaaactgcttgcagaagttgcgcgaggacatcagcagcaagctcgatagaaacctgggcgatagcttgcatcggcaagagatacaggttgtgctggagaagccgaacggattcagccagtcgcctacggccctgtacagctcaccgccggaagtcgacacctgcattaacgaggacgtagaatcactccgcaagaccgttcaagacttgctcgcaaaactccaggaagccaagagacagcaccagtcggattgtgtggccttcgaagtgaccctctcccgctaccagcgcgaagcggagcagtcaaacgtggccctgcagagagaagaagatcgcgttgagcagaaggaagccgaagtgggtgagttgcagaggcgcctcctggggatggaaacggagcaccaggcactgctggccaaagtgcgcgagggggaggtggctctggaagagcttcggtccaacaatgcagactgtcaagctgagagagaaaaggctgccaccttggagaaggaagtggctggattgcgggagaagatccaccacctggatgacatgctgaaatcacaacagagaaaggtgcgacagatgatcgagcagctgcaaaattcgaaggcggtcattcagtccaaggatgccactatacaggagcttaaggaaaagatcgcttatcttgaagccgaaaacctggagatgcatgatcgcatggagcacctcatcgagaaacaaatctcccatggaaactttagcacccaggcgcgagcgaaaactgagaatcctggctcaatcaggatctccaaacccccttcccctaaaccgatgccagtgatccgggtggtggaaact

SEQ ID NO: 20444 - DNA, 1170 bp, synthetic construct
  misc_feature 1..1170: note = source = /note="Description of Artificial Sequence: Synthetic coding sequence"
  source 1..1170: mol_type = other DNA
atgaatggtacccgtaattggtgtacccttgtggacgtgcacccggaagatcaggccgcgggcagtgtagatatcctccgcctaactcttcagggagagctgacaggcgatgagctggagcacatagcccaaaaggcaggtaggaagacgtatgcgatggtgtcctcacactcagctggacactcgctcgcttcagaactggtcgagagtcatgacggccacgaggaaatcatcaaggtctatttgaagggacgatcaggcgacaaaatgattcacgagaaaaatataaatcagcttaagagcgaggtacagtacatccaggaggcaagaaattgtttgcagaagcttcgggaagacatctcctccaagctcgataggaacctgggcgacagtctgcaccgccaggaaattcaggtggtccttgaaaagcctaatggattctcacaaagtcccacagctctttattctagccctccggaagtggacacctgtattaacgaagacgtggagtccctcagaaagaccgtccaggacctgttagccaagctgcaagaggcaaagcgccagcatcaaagtgactgtgtggcattcgaggtgaccttatcaaggtaccagagagaggcggagcaaagcaatgtcgccctacagcgggaggaggaccgggtggaacagaaagaagctgaagtgggggagcttcagaggaggttgctgggtatggaaaccgaacatcaggcactactggcaaaggtacgggaaggtgaggtggcactggaagagctgcgatcaaataatgcggactgtcaagcagagagggaaaaggcggcgacactggagaaggaagtggcaggtcttcgcgagaaaatccatcacctcgatgatatgctgaagtcacagcagaggaaggtccggcaaatgattgagcagttgcagaactcaaaagcagtcatccaatcgaaggacgctaccatccaggagctgaaggagaaaattgcctatctggaagcagagaacctggagatgcatgacaggatggaacacctcatcgagaagcagatctcccacgggaacttctcaactcaggctagagctaagactgagaacccagggtctataaggatatctaaacctcccagtccaaaacccatgccagtgattcgggtggtcgagacg

SEQ ID NO: 20445 - DNA, 1170 bp, synthetic construct
  misc_feature 1..1170: note = source = /note="Description of Artificial Sequence: Synthetic coding sequence"
  source 1..1170: mol_type = other DNA
atgaacgggacacgcaactggtgtaccctggtcgatgtgcacccagaagaccaagccgcaggcagcgtcgacatcttgcggctgacgctgcagggggagttgacgggtgacgagctcgagcacattgcgcagaaagccggtcggaaaacttacgcaatggtatccagtcactcggctggccacagcttggccagtgaacttgtcgaaagccatgatggccacgaggaaattataaaggtctatttaaaaggacggtcaggggataaaatgatacacgaaaagaacattaatcaactcaaatccgaggtgcagtacattcaggaagcccggaactgtctccagaaactacgggaggatatctcctcaaagctggatagaaatctgggggactccctgcatcgtcaggagattcaggtagtattggagaagcccaatgggttcagtcaaagtccaaccgcactatactcttcacctccagaagtagatacttgcatcaacgaagacgtagagtccctccgcaaaaccgtccaagaccttctggccaaacttcaggaagctaaaaggcagcatcagtccgactgtgtagcgttcgaggtaacactcagccgctatcagcgggaggcggagcagagcaacgtggcgctgcagcgggaggaagatcgagtggagcaaaaggaagccgaagtgggtgagctgcagagacgactactcggaatggagaccgaacatcaggccttgctggccaaggtgcgggagggcgaggtggcacttgaagaactgcgctccaataatgctgactgccaggctgagagagaaaaagcagcgaccctggaaaaagaagtggctggactacgcgagaagattcatcatctggacgacatgttaaagagtcagcagagaaaggtcagacagatgattgaacagcttcagaacagcaaggccgttatccagtccaaggatgccacaatacaagaattaaaagagaaaattgcgtatctcgaagcagagaatctcgagatgcacgaccggatggaacatctgatcgaaaagcagatttctcatgggaacttctcaacgcaggctcgcgccaaaactgagaacccgggcagcatcaggattagtaagccgccctcccccaagcccatgcctgtcattagggttgttgagacc

SEQ ID NO: 20446 - DNA, 1179 bp, synthetic construct
  misc_feature 1..1179: note = source = /note="Description of Artificial Sequence: Synthetic coding sequence"
  source 1..1179: mol_type = other DNA
atggaagagccccaaagtgatcccagcgtggagccgcccctgtcgcaggaaacattttctgacctgtggaaactcctacctgagaacaacgtgctcagtcccctgcccagtcaagctatggacgatttaatgctgtcacccgacgacatagagcaatggttcacggaagatccgggacctgatgaagctcctcggatgccagaagcagctccaccagtcgcccctgctcccgccgcccctacccccgccgccccagcacccgccccctcatggcctctcagctcaagcgttccttctcagaaaacctaccagggcagctacggctttaggctcggctttctccatagcggcactgctaaaagcgttacgtgtacctacagtccggcactaaacaagatgttctgccagctcgccaagacctgtcccgtccaactgtgggtggattccacacctcctcctgggacacgagtgcgagctatggcgatctacaagcagtcccaacatatgacagaagtggtgcgtcgctgtcctcaccacgaacgatgctccgatagcgacggcttagcgcccccacaacacctcatcagggtagagggaaatctgagagtcgagtatttagacgataggaatacatttcggcatagcgtagttgttccatacgaacctcccgaggtgggtagcgactgtacgactatccactataactatatgtgcaactctagttgtatgggcggaatgaatagacgacctattctaacgatcataacacttgaggattcctctggtaacctcctgggtagaaactcctttgaggtcagggtgtgtgcatgtccgggacgggataggaggacagaagaggagaatctgcgcaagaagggtgagccacatcacgagctacctcctggatcaaccaagcgcgctctgccgaacaatacttcttccagcccgcagcccaaaaaaaagccccttgatggcgaatactttaccctccagataagaggaagagagaggtttgaaatgtttagagagctgaacgaggccctcgaactcaaggacgctcaggctggcaaagagccgggcggctctagagcccactccagccacctcaaaagcaagaagggacagtcaacatcccgccacaaaaaacttatgtttaaaacggaggggcccgattctgat

SEQ ID NO: 20447 - DNA, 1179 bp, synthetic construct
  misc_feature 1..1179: note = source = /note="Description of Artificial Sequence: Synthetic coding sequence"
  source 1..1179: mol_type = other DNA
atggaagaaccgcaatcggatccgtcggtagaaccgccgttatcgcaagaaacgttttcggatttatggaaattattaccggaaaataatgttctatcgccgctaccgtcgcaagcgatggatgatttaatgttatcgccggatgatatagaacaatggtttacggaagatccgggtccggatgaagcgccgcgaatgccggaagcggcgccgccggtagcgccggcgccggcggcgccgacgccggcggcgccggcgccggcgccgtcgtggccgttatcgtcgtcggtaccgtcgcaaaaaacgtatcaaggttcgtatggttttcgactaggttttctacattcgggtacggcgaaatcggtaacgtgtacgtattcgccggcgttaaataaaatgttttgtcaattagcgaaaacgtgtccggtacaactatgggtagattcgacgccgccgccgggtacgcgtgtacgtgcgatggcgatatataaacaatcgcaacatatgacggaagttgttcgtcgttgtccgcatcatgaacgatgttcggattcggatggtctagcgccgccgcaacatttaatacgtgttgaaggtaatttacgtgtagaatatctagatgatcgtaatacgtttcgtcattcggtagtagtaccgtatgaaccgccggaagttggttcggattgtacgacgatacattataattatatgtgtaattcgtcgtgtatgggtggtatgaatcgtcgtccgatattaacgataataacgttagaagattcgtcgggtaatctactaggtcgtaattcgtttgaagttcgtgtatgtgcgtgtccgggtcgagatcgacgaacggaagaagaaaatctacgtaaaaaaggtgaaccgcatcatgaattaccgccgggttcgacgaaacgtgcgctaccgaataatacgtcgtcgtcgccgcaaccgaaaaaaaaaccgctagatggtgaatattttacgctacaaatacgaggtcgtgaacgttttgaaatgtttcgagaactaaatgaagcgttagaattaaaagatgcgcaagcgggtaaagaaccgggtggttcgcgtgcgcattcgtcgcatttaaaatcgaaaaaaggtcaatcgacgtcgcgacataaaaaactaatgtttaaaacggaaggtccggattcggat

SEQ ID NO: 20448 - DNA, 1179 bp, synthetic construct
  misc_feature 1..1179: note = source = /note="Description of Artificial Sequence: Synthetic coding sequence"
  source 1..1179: mol_type = other DNA
atggaggagccacaatccgatccaagtgtggagcctcctctgagccaggagaccttcagtgacctctggaagctgctccccgaaaataacgttctgagccctctgcctagccaggccatggacgatctcatgctaagccctgacgacatcgagcagtggtttactgaggacccgggacctgatgaggccccacggatgccggaggctgcgccgccagtagcgcccgcacctgccgctcccacaccagccgcccccgcccccgctccttcttggcccctcagcagctccgtgccgagccagaagacgtaccagggcagttatggcttcagacttgggttcctgcatagcgggaccgcaaagagcgttacctgcacatattccccagccctaaacaaaatgttctgccagcttgcgaagacctgccccgtgcaactgtgggttgatagcactccgccgcctggaacccgcgttagagccatggccatctacaaacagagccagcacatgaccgaggtcgtgcgcaggtgtccccatcacgaaagatgctccgacagtgacggcctcgcccccccacagcatctgattcgggtcgaaggaaatctgcgcgtcgaatatctcgatgacagaaatacttttagacattctgttgtagtgccttacgagccccccgaagtaggctcagactgcaccacgattcattataactacatgtgcaactcatcgtgtatgggtggaatgaacagaaggccgatcctgaccattatcaccctggaggatagttccgggaacttgttagggcgaaatagctttgaggtcagggtctgtgcatgtcctgggagggaccgtcgtacagaggaggagaatctcagaaaaaaaggtgagcctcaccatgagctgccgccaggcagcactaaacgggcacttccaaacaatacatcctccagcccgcagcccaaaaaaaagcctctggatggcgaatactttaccctgcagataagaggaagggagcgattcgagatgtttcgcgagctcaacgaagctctggagctgaaagacgctcaggccggaaaggagccggggggttcccgggcacacagttctcatctgaaatccaaaaaggggcagtctacctcccggcacaagaaattgatgttcaaaaccgagggtccggattcagat

SEQ ID NO: 20449 - DNA, 1179 bp, synthetic construct
  misc_feature 1..1179: note = source = /note="Description of Artificial Sequence: Synthetic coding sequence"
  source 1..1179: mol_type = other DNA
atggaagaaccccaaagtgaccctagtgtggagcctcccctctcacaggagaccttctcagatctgtggaaactgttgccagagaacaatgtgctgagccctctaccaagccaggccatggatgatttgatgttgtccccagacgacatcgagcaatggtttaccgaggatcccgggccagacgaggcgcctcgcatgcctgaagccgcaccccccgtggccccggctccagcagcgcccacccctgctgccccagctcctgccccttcatggccactctctagcagcgttccctcccagaagacatatcagggctcttatggctttcgactcggctttctgcacagcggcaccgctaagtctgtgacctgcacatacagccctgccttaaacaagatgttctgccagctggctaaaacgtgccccgtccagctgtgggttgactccacaccgcctcctggaactcgggttcgagcaatggccatctataaacagtcccagcacatgactgaggtggtgcggcgctgtcctcaccatgagcggtgtagtgactcagacggactggcgccaccgcaacatctcattcgagttgagggaaacctcagggttgagtacctggatgatagaaacaccttccgccattccgtggttgttccatacgagccccctgaagttggatcggactgcacgactatccattacaactacatgtgcaactcctcgtgtatgggtgggatgaatcggaggcccatcctaaccattataaccctcgaggactcatcaggtaatctcctgggtagaaactcctttgaggtccgggtctgcgcctgccctggaagagaccgacgcacagaggaggagaacctgcgcaaaaaaggagagcctcaccacgagctgcccccgggctccaccaaacgagcacttcccaataacacgtcctcatccccccagcccaagaagaaaccactagacggggaatactttacgctccagattagaggacgggaacgctttgagatgttccgcgagctcaacgaggccttagaactgaaggatgcacaggcaggcaaagagcctggaggctccagggctcattcatcacacctgaaatcaaagaaggggcagagtaccagccggcataagaagctgatgttcaagaccgagggtcctgactctgac

SEQ ID NO: 20450 - DNA, 1179 bp, synthetic construct
  misc_feature 1..1179: note = source = /note="Description of Artificial Sequence: Synthetic coding sequence"
  source 1..1179: mol_type = other DNA
atggaggagccgcagtcagacccaagcgtggaaccgccgctgtcgcaggaaaccttctcggatctgtggaaactgctcccagaaaacaatgtgttgtcaccgctgccctcacaagcaatggacgacttgatgctgtcccctgacgacatcgaacagtggtttactgaagatcctggtcctgatgaggcaccaagaatgcctgaggccgctcccccagtcgcgcccgcccctgcagcgccgactccggccgcgccagccccggccccatcttggccacttagctcctccgtgccgtcgcaaaaaacctaccagggatcatacggtttcaggctcggctttctgcattcgggaacggccaaaagcgtgacctgcacttacagcccggcgctgaacaaaatgttttgtcaacttgcgaaaacttgcccggttcagttgtgggtggactccacccctcctccgggcactagagtgagagcaatggccatctataagcagtcgcagcacatgactgaggtcgtgcggcggtgcccacatcacgaaaggtgctcggactcggacgggctcgccccgccgcagcacctgatccgcgtggaaggcaaccttagggtcgagtacctcgatgatagaaataccttccggcattccgtcgtggtcccgtacgagcctcccgaagtcggatcggattgtaccaccatccattacaactatatgtgtaatagcagctgcatgggtggcatgaaccgccgcccgattctgaccatcatcaccttggaggattcatcaggaaatcttctgggcagaaactccttcgaagtcagagtgtgcgcttgccctggacgggacagacgtactgaagaggaaaatctgcgcaagaaaggggagccacatcacgagctgccgccggggtcaacgaaacgcgcacttccgaacaacacttcttcaagcccccagcccaagaagaaaccgcttgacggcgagtacttcactctgcaaattagagggcgcgagaggttcgaaatgttccgggagctgaacgaagcactggagctgaaggatgcgcaggccggaaaagaaccgggcggtagccgcgctcattcatctcacctgaagtcgaagaaggggcaatcgacttcgaggcacaagaagctgatgttcaagacggagggcccggattccgac

SEQ ID NO: 20451 - DNA, 1179 bp, synthetic construct
  misc_feature 1..1179: note = source = /note="Description of Artificial Sequence: Synthetic coding sequence"
  source 1..1179: mol_type = other DNA
atggaagagccccagtcggatccttcggtcgaaccccctctctcgcaagaaactttcagcgatctctggaaacttcttcctgaaaacaatgtgctgagcccactcccaagccaggctatggatgatcttatgctttcgcccgacgacatcgaacaatggttcacggaagatcctgggcctgatgaggcacccaggatgcctgaggccgcacctccagtcgcaccagcaccagcagcgcctacgcccgctgcaccagcccctgctccttcctggccactgtcaagctccgtgcccagccaaaaaacttatcagggttcctacggattcagactgggttttctgcattcgggaaccgcgaagtctgtcacttgcacctacagccccgccctcaacaagatgttttgtcagctggcaaagacctgcccagtgcaactctgggtggattccaccccaccacctggaaccagggtcagagcaatggcaatttacaagcagagccaacatatgaccgaagtggtgagaagatgcccacatcacgaacggtgttcagactcagatgggctggccccacctcaacacctgattcgcgtcgaaggcaatttgagggtggaataccttgacgacagaaacaccttccgtcattcggtggtcgtcccttacgagcctcctgaggtgggtagcgactgtacgaccattcactacaactacatgtgtaattcctcttgtatgggtggaatgaatagacggccaatccttactatcattacgcttgaagattcgtcaggtaaccttctcggtagaaattcgtttgaagtgagagtgtgtgcctgcccaggtagagataggcgcactgaagaggaaaatcttaggaagaagggtgaaccgcatcatgaattgccacctgggtccactaagagagcactgcctaacaacactagctcctcaccacaacctaagaaaaagcccttggacggtgaatactttaccctccagattcgaggaagggaaagatttgaaatgttccgggaattgaacgaagccctcgaactcaaagacgcccaagcaggtaaagaaccagggggatcaagagcgcatagctcgcatctgaaatcgaagaaggggcagtcgaccagccggcacaagaagctgatgtttaagacggagggtccagattcagat

SEQ ID NO: 20452 - DNA, 1179 bp, synthetic construct
  misc_feature 1..1179: note = source = /note="Description of Artificial Sequence: Synthetic coding sequence"
  source 1..1179: mol_type = other DNA
atggaagaaccacaatccgatccttccgtggagccacccctgtcacaggagacgttctcagatctctggaaacttctcccggagaataatgtcctcagcccactgcctagccaggccatggacgatttgatgctttcccccgatgatattgagcaatggttcactgaagatcctgggccggatgaagcgcctcgcatgccagaagccgcgccaccagtggcacctgcaccagcagcaccaactcccgcggcaccagcgccagccccctcgtggcccctttcttcgtcggtcccatcgcaaaagacctaccagggttcgtacggcttcaggctgggtttcctgcattccggtaccgctaaatcggtgacctgtacgtactcacccgctcttaacaagatgttttgtcagcttgcaaagacttgtccggtgcaactttgggtggattccacccctccaccgggcactagggtgcgcgccatggcgatttacaaacaaagtcagcacatgactgaggtggtccggcgctgtccccatcacgagagatgctcggactccgacggacttgcgcctccacagcatctgatccgggttgagggcaacttgcgggtcgaataccttgacgacagaaacaccttccggcattccgtggtcgtcccctacgagcctcccgaggtaggatccgattgtactaccattcattacaactacatgtgcaactcgagctgtatgggagggatgaatcggcggccgatactgactattatcaccctcgaggattcgagcgggaacctccttggtcgtaattcctttgaggtgagagtgtgcgcatgtcccggacgtgatcgccgtaccgaagaagaaaacctgagaaaaaagggagaacctcatcatgaattgcctcctgggagcaccaagagagccctgccaaataacacttcctcatccccgcagcctaaaaagaagccacttgatggtgaatacttcacgcttcaaattagagggcgcgaaagatttgaaatgttcagggaacttaacgaggcattggaactgaaggatgcacaagccggtaaggaacccggtggaagtcgggcgcacagctcacatctgaagagcaagaagggacaatctacctcacgccacaagaaacttatgttcaaaacggaaggtcccgactcggat

SEQ ID NO: 20453 - DNA, 1179 bp, synthetic construct
  misc_feature 1..1179: note = source = /note="Description of Artificial Sequence: Synthetic coding sequence"
  source 1..1179: mol_type = other DNA
atggaggaacctcagtccgatccatccgtcgaaccccccctttcacaagagacgttctccgacctttggaagttattacccgaaaataacgtactgtcccctttaccatcacaagctatggacgacctgatgctcagtcctgacgatattgaacagtggttcacagaagaccccgggccagacgaggcccctcgaatgccagaggcagcccctccggttgcccctgctcctgctgccccaaccccggccgccccggcccctgccccttcctggccgctttctagcagcgtgcctagccagaaaacttaccagggaagctatggctttcgactaggtttcctccactctggaacagctaagagtgtcacttgtacgtatagcccagctttgaacaagatgttctgtcagctagcaaaaacatgccccgttcagctgtgggttgactccacccccccgcctgggacccgcgtgcgggccatggcaatttacaaacagtcccagcacatgacagaagtcgtaagacgatgtccacatcacgaacgctgctctgacagtgacggccttgctccaccccagcacttgatccgggtggagggcaacttgcgtgttgagtacctagatgacagaaacacgttcagacacagcgttgtcgtgccctacgaaccccctgaggtagggtccgattgcacaactattcactacaattatatgtgtaatagttcttgcatgggcggaatgaataggcgtcctatcttaacaatcattaccctggaggattcgtcaggcaatcttcttggccggaattcattcgaggttcgggtctgtgcatgtccgggcagggacaggcggacagaagaagaaaatctgagaaagaagggtgagccccaccacgagctgccacctgggagcaccaagagggcactccccaacaatactagctcctctccacaacctaagaagaaacctctggatggcgaatattttactctgcaaatcagggggagggagagattcgaaatgtttcgcgaattgaatgaggcgctggaacttaaagacgcccaggccggtaaggaaccagggggaagccgggctcacagctctcacctgaaaagtaagaaaggacaatcaaccagcaggcacaaaaaactcatgttcaaaactgaggggccggacagcgat

SEQ ID NO: 20454 - DNA, 1179 bp, synthetic construct
  misc_feature 1..1179: note = source = /note="Description of Artificial Sequence: Synthetic coding sequence"
  source 1..1179: mol_type = other DNA
atggaggagccgcagtccgaccccagcgtcgagcctcctttgtcgcaggaaacctttagcgatctgtggaaactcctgccggagaacaatgtgttgtccccattgccatcccaggcaatggatgacctgatgctctcgccggacgacattgaacaatggttcactgaagatcctgggcctgatgaggcgccacgcatgccggaagccgccccgccggtcgcgccagcgcctgccgcgccgactccggccgccccagcacctgccccgtcctggccactcagcagctcggtgccgtcgcaaaaaacctaccagggatcatacgggtttcggcttggcttcttgcattccggaaccgcgaagtcagtcacgtgcacttacagcccggcactgaacaaaatgttctgccagctggctaagacttgccccgttcaactgtgggtggattccactccgccgccaggcactagagtgcgcgccatggctatctacaaacaatcccaacacatgactgaggtggttagacgctgcccacatcatgaaagatgcagcgactccgatggactcgccccgccacagcatctgatccgcgtggagggaaacctgagagtggaatatctggacgaccggaataccttccgccactcagtggtggtgccatacgaaccgccagaggtcggatcggactgtaccactattcactacaactacatgtgcaacagctcctgcatgggcggaatgaaccgcaggccaattctcaccattatcactctggaggactccagcggtaacctgctgggacgcaactcgttcgaggtccgcgtttgcgcatgccccggacgcgatcggagaaccgaagaggagaatctgcgcaagaaaggagaaccacatcacgagctgccaccgggatccaccaagagagcccttccaaacaacacttcctcgtcgcctcaaccaaagaagaaaccactggacggcgaatactttaccctccaaatcagggggcgggaaaggtttgaaatgttccgcgaactgaatgaggcactggaactcaaggatgcgcaagctggtaaggagcctggaggatcccgcgcacattcgtcccacctcaagtccaaaaagggacaatcaaccagcagacataagaagctcatgtttaagacggagggcccggattctgac

SEQ ID NO: 20455 - DNA, 1179 bp, synthetic construct
  misc_feature 1..1179: note = source = /note="Description of Artificial Sequence: Synthetic coding sequence"
  source 1..1179: mol_type = other DNA
atggaagagcctcaaagcgatccttccgtcgaacctccactgtcacaggaaaccttcagcgatctctggaaactgcttccagaaaacaatgtgctttccccactcccttcacaggcaatggatgaccttatgctgtcacctgacgatatcgagcaatggttcactgaggaccctggacctgatgaagcaccaaggatgcctgaggcagccccaccagtggcaccggcaccggcggcacctaccccggccgccccagcacctgcaccttcgtggccgctttcatcctctgtgccatcccaaaaaacctaccaggggtcgtacggatttagactgggcttcctgcattcgggcaccgccaagtcagttacttgtacgtactcccccgcactgaataagatgttctgtcaattggccaagacttgccctgtccaactctgggtggactcgactcctccccctggaacgagagtgcgagccatggcaatctacaagcagtcacaacacatgaccgaagtggttcgccgctgtcctcatcatgaaaggtgctccgatagtgatggtctggcacccccgcaacatctgatccgcgtcgaaggaaacctgagagttgagtacctcgatgatagaaacactttcagacactcggtggtcgtcccttacgaaccaccagaagtcggatcggactgtactacgattcattacaactacatgtgtaacagctcgtgtatgggaggtatgaatagaaggcccattcttaccataatcaccttggaggactcatcgggaaacctgctcgggcgtaactcgtttgaggtgcgcgtgtgcgcatgtcctggacgtgatcgcagaaccgaggaggaaaatcttagaaagaagggtgagccacatcatgaattgccaccagggagcactaagcgagcacttccaaacaatacctccagctctccgcagccaaagaagaagcctctggatggagagtacttcactttgcagattagaggaagagagcgattcgaaatgtttagggagcttaacgaagcactggaactgaaggatgcgcaagcaggcaaagaaccaggaggttctcgcgcccattcgagccacttgaaatccaagaagggccaatcgacttccaggcacaaaaagctcatgtttaagaccgaggggccagactcggat

SEQ ID NO: 20456 - DNA, 1179 bp, synthetic construct
  misc_feature 1..1179: note = source = /note="Description of Artificial Sequence: Synthetic coding sequence"
  source 1..1179: mol_type = other DNA
atggaagagccgcagtccgacccgagcgtcgaaccaccactctcgcaggaaaccttctcggacttgtggaagctcctcccagaaaacaacgtcctctccccactcccttcccaggcaatggacgacctgatgttgtccccagatgatattgagcagtggttcaccgaagatccaggcccagacgaggcgccgaggatgcctgaggcagccccaccagtggccccagcgccagccgcacctactcctgccgcccccgctcctgccccgtcatggccgctgtcctcctcagtgccgagccaaaagacgtaccaaggctcatacgggttccgcctcggattcctccatagcggaacggccaagtcggtgacttgtacctactcaccggctctgaataagatgttttgccagctcgcgaaaacttgcccggtgcagctgtgggtcgacagcacccctcctccaggcactagagtgcgcgccatggccatttacaagcagtcccagcatatgactgaagtggtgcgcaggtgcccacaccatgaacggtgtagcgattcagatggactggccccacctcaacacctcatccgcgtggaaggtaatttgcgcgtggagtacctggatgaccggaacaccttccggcactcggtggtggtgccgtacgaaccaccagaagttggatccgactgcactaccatccattacaactacatgtgcaattcgtcgtgcatgggagggatgaaccggaggccgatcctcactatcatcaccctggaggactcctcgggtaacctgctcggccggaactcgttcgaggtgcgcgtgtgcgcttgtccgggaagggaccggcgcacggaggaggagaacctgcggaagaaaggagaaccacatcacgagctgcccccggggagcaccaagagagctctgccgaacaatacgtcctcgtcgccacagcctaagaagaagccgctggacggagagtacttcactcttcaaatccgcggaagggagcgcttcgagatgttcagagagctcaacgaggccctggagctgaaggacgcacaggctggtaaagagccgggcggaagccgggcacactcatcacaccttaagtccaagaagggccagtcaacttccagacacaaaaagttgatgttcaagaccgaaggcccggattctgac

SEQ ID NO: 20457 - DNA, 1179 bp, synthetic construct
  misc_feature 1..1179: note = source = /note="Description of Artificial Sequence: Synthetic coding sequence"
  source 1..1179: mol_type = other DNA
atggaggaaccacaaagtgacccctccgtagagccccccctgagtcaagagacgttctccgacctgtggaaactgctgcccgagaataacgtgcttagtccgcttccaagccaggccatggatgatctgatgttaagccccgacgacatcgaacagtggttcaccgaggatccggggccggatgaagcacctcgaatgccagaagctgccccaccagtcgctcccgctccagctgcacccactcctgctgctccagcccccgctcctagctggccactgtcctcatccgtgccgtcccaaaaaacgtaccaggggtcgtacgggttcaggctgggctttctgcactccggcacagcgaagtccgtcacttgtacttacagtcctgccctgaataagatgttctgtcagctggcaaaaacttgtcccgtccagctgtgggtagatagcaccccaccaccgggcacaagagtgagggccatggcaatctacaaacagagccagcacatgaccgaagtggttcgccggtgcccacaccatgagcggtgcagcgactccgatggcctagcacctcctcaacacttgatccgcgtggaaggcaacttaagggttgaatacctggacgataggaacactttccgacatagcgttgttgtgccctatgagccgccagaggtaggcagcgactgcactacgattcattacaactacatgtgcaactcttcctgtatgggcggtatgaaccggcgcccgattctcaccatcatcaccttggaggactcatccgggaatctgcttgggcgaaattccttcgaagtcagggtgtgtgcctgtcccggacgcgatcgccgaacagaggaggaaaacctcaggaagaagggcgaacctcatcacgagctccctcctgggtccacaaaaagagccctgcccaataataccagcagctctccgcagcctaagaagaaacctctcgacggcgaatatttcactctgcagattaggggccgagagcggttcgaaatgttccgcgagctcaacgaggccctcgagctgaaagacgcccaagcaggcaaagagcccggcgggtctagggctcattccagccatctcaagtcaaagaagggtcagtccacgtctaggcataagaaactgatgtttaagaccgaagggcccgactcggac

SEQ ID NO: 20458 - DNA, 1179 bp, synthetic construct
  misc_feature 1..1179: note = source = /note="Description of Artificial Sequence: Synthetic coding sequence"
  source 1..1179: mol_type = other DNA
atggaagaaccccagtctgaccctagcgtggagcctcctctctcccaggagacattttcggacctgtggaaattattacctgaaaacaacgtgctgagcccactcccatctcaggctatggatgatctgatgctaagtccggacgacattgaacaatggttcaccgaggaccccggtcctgacgaagccccacgtatgcctgaggccgctccgccagttgccccagccccagccgccccaacgcccgctgctccggctccagccccttcatggccattgagctcctctgtcccgtcgcaaaagacatatcaaggatcttacggctttcggttaggttttctgcactccggaacagcaaagtcagttacctgcacctattctcccgctttaaacaagatgttttgccagcttgctaagacatgccctgtgcaactgtgggttgatagtactcctcccccaggcacgcgggtgcgggccatggccatctacaaacagagccagcatatgactgaggtagttagaaggtgcccacaccatgagaggtgtagcgactctgatggactggcgcctccccagcacctcataagagtggagggtaaccttcgggtggagtacctggacgataggaatacatttagacacagcgtggtggtcccgtatgaaccaccggaggttgggtctgattgcaccacaattcattataattatatgtgcaactccagctgtatgggagggatgaacagacggccaatactgaccatcatcacactggaggacagcagtggaaatctgctcgggagaaacagcttcgaggttagggtctgcgcttgccctggcagggacagacggacagaggaagaaaacctgcgcaaaaaaggggagccccatcatgaattacccccaggctcgaccaaaagggctctgccaaataatacatccagcagtccacaaccaaagaagaaacctttggatggcgagtatttcacacttcagatcaggggccgtgagagattcgagatgttccgtgagctgaacgaggctctcgagctgaaagacgcccaggcaggtaaagaaccagggggttcgagagcacattcttcccacctgaagagcaaaaaaggccagtcgacatcccgacacaagaagctgatgtttaaaaccgagggcccagattctgac

SEQ ID NO: 20459 - DNA, 1179 bp, synthetic construct
  misc_feature 1..1179: note = source = /note="Description of Artificial Sequence: Synthetic coding sequence"
  source 1..1179: mol_type = other DNA
atggaagaaccacaaagtgaccctagtgttgaacctccgctgagccaggaaacattttctgacctgtggaaattattacctgaaaataatgtgttatcaccgttaccatcacaggcgatggacgacctaatgctctctccggacgacatcgagcaatggtttaccgaagatcctggtccggacgaggctccgcgcatgccggaagccgcgccccctgtagctccggcgcctgcagcgcccacacctgctgctcccgcccctgcgcctagctggcctttatcatcctcagtcccgtcacaaaaaacgtaccaaggtagctatggatttcgcttaggatttctccactcagggacggccaagtctgtaacctgcacgtactccccggccctgaacaagatgttctgtcaactggctaagacatgcccggttcagctgtgggtagattcgactcccccgcctggaacaagggtgagagccatggcgatctacaaacagtcccaacatatgacagaagtagtgcgacgctgtccccaccacgagagatgctccgacagtgatgggctcgctccaccgcaacacttgattcgggtggagggtaaccttagagtagaatacctagatgatcgtaatacctttaggcattccgtcgttgttccttatgaaccaccggaagtgggttctgattgtactacgatacattataattatatgtgtaattcgtcttgcatgggggggatgaatcgtagaccgatccttacaattattacattggaagatagctcaggaaacctgttgggccgcaactcattcgaagttcgggtgtgtgcctgtcctggaagggatcgacggacagaagaagaaaatttgagaaagaaaggggaaccacatcatgaattgccgcctggctctacgaaacgagcactgcctaataacacgagcagttccccccagccaaagaagaaacctctagatggtgagtactttacactgcagattcgaggccgagaaagatttgaaatgtttcgagagctgaacgaagcattggaacttaaagacgcacaagccgggaaggaaccgggcggtagtcgtgcccacagctcacacctgaagtccaaaaaaggccaatccactagccgccataaaaaactgatgttcaaaacagagggcccggactcagat

SEQ ID NO: 20460 - DNA, 1179 bp, synthetic construct
  misc_feature 1..1179: note = source = /note="Description of Artificial Sequence: Synthetic coding sequence"
  source 1..1179: mol_type = other DNA
atggaggaacctcagtctgacccatccgtggagccccccctcagccaagaaaccttctctgacctttggaaactgctgccagaaaacaacgtcctgtcccctctccccagtcaggccatggacgacctcatgctgagtccagacgacatcgagcaatggttcactgaagatccaggacctgatgaggctcctaggatgcccgaggcagccccccccgttgctcccgctcctgcagctccaacaccagccgctccagcacccgccccttcttggcccctttcaagcagcgtgccttcacaaaaaacctatcagggttcctacggattccgcttgggcttcctccactcaggaaccgcaaagtccgtaacctgtacatactcacccgctctgaataaaatgttctgccagttggcaaaaacctgtccagtacagctgtgggtggattcaacaccacctcctggtacaagggttcgtgcaatggcaatctacaagcagagccagcacatgacagaagtggtaaggaggtgcccccaccacgagcgctgcagtgactcagatggtctcgcccctccccagcacctgatccgtgtcgagggcaacctgagagttgaatacctggacgatcgcaacactttcaggcactctgtggtcgtgccttacgagcctcccgaggtgggaagtgactgcaccacaatccactacaactacatgtgcaactcctcctgcatgggtggtatgaatagaagaccaatcctgacaatcattactctggaggacagctccggaaacctgcttggaaggaacagtttcgaagtccgtgtctgcgcctgccctggtcgcgacagaagaaccgaagaagagaacctgaggaagaaaggagaaccccatcatgagttgccacccggttccacaaaaagagccctccctaacaacacctcttcctcaccccagcctaaaaagaagccacttgatggcgagtacttcactcttcagatcaggggccgcgaaaggttcgaaatgttcagagaacttaatgaagcccttgaactgaaggacgcccaggccggtaaggaacctggcggctccagagcacactcaagtcacttgaagtctaagaaaggacaaagtacttcacgtcataagaagctcatgttcaagaccgaaggacccgatagcgac

SEQ ID NO: 20461 - DNA, 1179 bp, synthetic construct
  misc_feature 1..1179: note = source = /note="Description of Artificial Sequence: Synthetic coding sequence"
  source 1..1179: mol_type = other DNA
atggaggagccacaatccgacccgtccgtggaacctccgctctcgcaagaaaccttttccgatctgtggaagctccttcccgagaacaacgtcctgagcccacttccatcgcaggcaatggacgatctgatgctttcgcctgatgacatcgagcagtggtttacggaagatcctggaccggacgaagcgcccagaatgcccgaagcagccccacctgtggcccctgcgccggccgcgcctacccctgcagcccctgcaccggcacccagctggccactgtcgtcgtccgtgccgtcgcaaaaaacctaccaggggtcgtacgggtttagactgggttttctccatagcggaactgctaagagcgtcacttgtacttactccccagcgcttaacaagatgttttgtcaactggccaagacttgcccggtccaactctgggtggattccactccgcctccaggaacccgcgtgcgtgcaatggctatttacaaacagtctcaacacatgactgaggtggtgcgtagatgtccacatcatgagcgttgttcagattccgatggcctcgcaccaccccaacatcttattcgggtggaaggcaatctccgggttgaatacctcgacgatcgcaacactttcagacattcggtggtcgtgccttacgagccaccagaggtcggtagcgattgtactaccatccactacaactacatgtgtaactccagctgtatgggaggaatgaaccgcagacctatcctgaccattatcaccctggaggactcatcgggaaatttgctgggtaggaattcgtttgaggtcagggtgtgtgcatgccccggaagagatagacgaaccgaagaggaaaatctcaggaaaaaaggagaaccgcaccatgaacttccacctggatcaacgaagcgcgctttgcctaataacacttccagcagcccccaaccgaagaaaaagcccctggatggagagtactttacgctgcagattagggggcgcgagagatttgaaatgttcagggagcttaacgaggccctcgagctgaaggacgctcaagccggaaaggaacccggtggatcaagagcacatagctcgcatctgaagtcgaagaaaggacaaagcaccagccgacacaaaaagctgatgttcaaaacggaaggcccagactcagat

SEQ ID NO: 20462 - DNA, 1179 bp, synthetic construct
  misc_feature 1..1179: note = source = /note="Description of Artificial Sequence: Synthetic coding sequence"
  source 1..1179: mol_type = other DNA
atggaggaaccacaatcagacccctcagtggagcccccccttagccaggagaccttctctgacctgtggaaactgctcccagaaaacaacgtgctgtctcccttgccaagtcaggccatggacgatcttatgctttctcctgatgacatcgaacaatggttcacggaggaccccggaccagatgaggcgccccggatgcccgaagctgcaccgcctgtggcacctgcacccgcagcgcctacaccagcagcccctgccccagcaccgagctggccattatccagctcagtccctagccagaagacataccagggttcttatggattccgtctcggcttccttcacagtgggactgcgaagtccgtgacttgcacctatagtccggccctgaataagatgttctgccaactggcgaaaacttgccccgtgcagttgtgggttgactctactccgcccccaggaacacgggtaagggctatggccatatacaaacagagtcagcacatgactgaggttgtccgccgctgcccccaccacgaacgatgttccgattctgacgggctggctcctccacagcacttgattcgtgtggagggcaatctgagggtggaatacctcgatgacaggaacaccttcaggcactctgttgtcgtaccgtatgaaccacccgaagtggggtctgactgtacaacaattcattacaattacatgtgtaattcaagctgcatgggagggatgaataggcggccaattcttaccatcattacgttggaggacagcagcggcaacctgctggggcggaactcgtttgaggtgagggtgtgcgcgtgccccggccgcgataggagaactgaagaagagaatttgcgaaagaagggggagccccatcacgaactgccccccgggtcgactaagagagcattacccaacaatacgagttcatctccacagccaaaaaagaagcccctcgatggcgagtactttacactgcagatccggggtagggagaggtttgagatgtttcgggagctcaatgaagctttggagctgaaagacgcacaggcagggaaagaacccggcggatcacgtgcccatagctcccatctgaaatccaaaaaggggcagtctacaagccgccacaaaaagctcatgttcaagacggaaggccctgattccgac

SEQ ID NO: 20463 - DNA, 1179 bp, synthetic construct
  misc_feature 1..1179: note = source = /note="Description of Artificial Sequence: Synthetic coding sequence"
  source 1..1179: mol_type = other DNA
atggaagaaccacaaagcgatccttccgtggaaccccctctctcgcaagaaaccttttctgacctctggaagctccttccggaaaacaacgttttgtcaccgctgccttctcaagctatggacgatctgatgctgtcaccagatgacatcgagcagtggttcaccgaggacccaggaccagacgaggccccccggatgcctgaagcagcacccccagtggcccctgcaccagcagcaccgacccccgcagcaccggcccccgccccatcctggcctctgagctcgtccgttccatcccaaaagacctaccagggcagctacggcttccgcctcggcttcttgcattcagggaccgccaagagcgtgacctgcacctactcccccgcactcaataagatgttctgtcaactggctaagacctgtccggtccagctgtgggtggattcaactccccctcctggaacgagagtgcgggcgatggcaatatacaagcaatcgcagcatatgactgaggtcgtgcggagatgccctcatcacgaaaggtgtagcgattcggatggtttggcacctccacagcatcttattcgagtggaaggaaacctcagggtggagtacctggatgatcgcaacacttttagacattcagtggtggtcccctatgaacctcctgaagtgggatcagactgcactactatccattacaactatatgtgtaattcctcctgtatggggggtatgaatagacgccccatccttactattatcactctcgaggactcctccgggaatttgcttggaagaaattcctttgaagtccgggtttgcgcctgtcctggacgtgatcgaagaactgaggaagagaacctccgtaaaaagggcgagcctcaccacgaactccctcctggatcaactaaaagggcgcttccaaacaatacttcaagctctcctcaacctaagaaaaagccactggacggagagtactttacgttgcagattcgcggacgcgaacgatttgaaatgtttcgcgaattgaacgaggcgcttgaactcaaggatgcacaggcaggtaaagaaccaggaggctcgagagctcattcctcacacttgaagtccaagaaaggtcaatcgacctcgaggcacaagaaactcatgtttaagacggaagggcctgattccgac

SEQ ID NO: 20464 - DNA, 1179 bp, synthetic construct
  misc_feature 1..1179: note = source = /note="Description of Artificial Sequence: Synthetic coding sequence"
  source 1..1179: mol_type = other DNA
atggaagagccacagtctgacccgagtgtagaacctccgctttctcaggagacattcagcgatctgtggaagctcttgccggaaaacaacgttctatcacctctgcctagtcaggcaatggacgatcttatgttatcacccgatgacatcgagcagtggtttactgaagatcccgggccagacgaggcgccacggatgcccgaggccgcccctccggttgctccagcgcctgcagcacccactcccgcagctcccgcaccagctcccagctggccgttaagttccagcgtcccctctcagaagacctaccaaggatcctacggatttcgccttggattcttgcattctggaacagcgaagagcgtgacatgtacctactcgccagccttaaataaaatgttctgtcagttggcaaagacctgccctgtgcagttgtgggtggattccacaccgccccccggcacaagagtcagagcaatggcgatatacaagcagtcacagcacatgaccgaggtggtcaggcggtgtcctcatcatgaaagatgttctgatagcgacggcctcgcccccccccagcacctgattagagtggaaggcaatttgcgcgtcgagtatctcgacgatcggaatacatttcgccattctgtggtggttccttacgaaccgcctgaggttggtagcgactgtaccaccatccactataactacatgtgcaactccagttgcatgggaggcatgaatcgccgcccaatcctgactattatcaccctagaagatagtagcgggaatctgctgggtaggaactcatttgaggtacgcgtctgtgcgtgtcccggccgcgatcgccggacggaagaggagaacctccgtaaaaagggcgagccccaccacgaacttccaccagggtctaccaaaagggctctaccgaataacacgagttcatccccccagccaaaaaagaagcctttggatggggagtactttacactccaaatcaggggtagagaacggtttgagatgttcagggagctgaacgaggccttggagctcaaggatgcacaggctggaaaggagccaggcggctctagagcccattcatctcatctgaagtcgaaaaagggtcaatcaacctcaagacataagaaactgatgtttaaaaccgagggacccgattccgac

SEQ ID NO: 20465 - DNA, 1179 bp, synthetic construct
  misc_feature 1..1179: note = source = /note="Description of Artificial Sequence: Synthetic coding sequence"
  source 1..1179: mol_type = other DNA
atggaagagccacagtccgatcctagcgtcgaaccccctctgtctcaggagactttctcagacctttggaagctgttgccagagaataatgtgctctcccccctcccttcacaagccatggatgatcttatgctgtcaccagatgacattgagcaatggttcaccgaggaccccggaccagatgaggcaccacggatgccagaggcagctcctcctgtggcacccgctccagcagcgcctactcccgcagcacctgcgcctgcaccctcatggcctctttcttcgtcggtcccatcccagaaaacctaccagggatcatacggattccggctgggatttcttcatagcggcactgctaaatcagtcacctgtacttactcccctgcactgaacaagatgttctgccagcttgccaagacttgtccagtccaactctgggtggattctaccccgccgccgggtactcgtgtgagagccatggcaatctacaaacagagccaacacatgacggaagtggtgcgccgctgtccgcatcatgaacggtgctcggactccgatggtctggctccaccacaacacctcattagggttgagggaaacttgcgcgtggaatacctcgatgatcgcaacacgttccggcactcggtggtggtcccttacgaacctcccgaagtgggttccgactgtactaccatccactacaactacatgtgtaactcatcctgtatgggaggaatgaaccggcggccaatcttgaccatcattacccttgaggactcgtcggggaacctgctggggcgtaactcttttgaagtgcgggtctgtgcatgccccggacgggaccggcgaaccgaagaggagaatcttagaaagaagggagagccacaccatgaactgcctccgggatcgaccaagcgcgccctgcccaacaatactagctcatcgcctcaacctaaaaagaagccactggatggcgaatactttaccctccaaattaggggaagggaacgctttgaaatgttccgggaacttaacgaggcactggaacttaaagatgcccaggccggcaaagaaccgggaggctcccgagcgcattcgtcacatcttaagtcaaaaaagggacagtcgacctcgcgtcataagaagctgatgtttaagaccgagggtcccgacagcgat

SEQ ID NO: 20466 - DNA, 1179 bp, synthetic construct
  misc_feature 1..1179: note = source = /note="Description of Artificial Sequence: Synthetic coding sequence"
  source 1..1179: mol_type = other DNA
atggaagagcctcagagcgatcctagcgtcgaacctcctttgtctcaagaaacctttagcgatctatggaagctcctgcccgaaaataacgtgctgagccctttgccgtctcaggccatggacgacctgatgctctcccctgacgatatcgaacaatggtttaccgaagatcctgggccggatgaggcgcctcgcatgcctgaggccgcgcctcctgtcgcccctgcgcccgctgccccgacgccggctgcgcccgcgccggcacccagctggcctctaagctcgtctgtgcctagccagaaaacataccaggggagctacggtttccggttgggcttcctgcacagcggaaccgccaagtctgtgacctgcacctacagccctgcactgaacaagatgttttgtcagcttgccaaaacgtgcccagtgcagctttgggtcgacagcacgcctcctccagggacccgtgtgcgtgccatggctatctataagcagtctcaacacatgactgaggtggttcgccgttgccctcaccatgagcgctgctcagatagcgacggtctggccccaccgcagcacctgattcgcgtcgagggcaatctccgagttgagtacctggatgaccgcaatacgtttcggcatagtgtggtcgtcccttacgagccgcctgaggtgggcagcgattgtacgactattcactataattacatgtgcaatagctcttgtatgggcggcatgaaccgcagacctatcttgaccattataaccctggaagactcgtctggtaatctgttgggtcggaattccttcgaagtccgcgtttgcgcgtgcccaggccgggataggagaactgaggaggaaaaccttcgtaaaaaaggagagccgcatcatgaactgccgccgggtagcaccaaacgcgcgctgcctaacaacacctcgagcagcccgcaaccgaagaaaaagcctcttgacggggaatactttactctgcagatacgtggtcgtgagcgcttcgaaatgttccgcgaattgaacgaggccctggaactgaaagacgcacaggcaggcaaggagcccggcggtagcagagctcatagtagccatctgaagagcaagaaaggccagtccaccagccgtcataaaaaactgatgtttaagaccgagggccccgatagcgat

SEQ ID NO: 20467 - DNA, 1179 bp, synthetic construct
  misc_feature 1..1179: note = source = /note="Description of Artificial Sequence: Synthetic coding sequence"
  source 1..1179: mol_type = other DNA
atggaggaaccccagtctgatccaagcgtggaacctcctctttcccaggagactttctcggacctgtggaagctgctgccggaaaacaatgtgctctccccgctcccctcccaggctatggatgacctcatgctctccccggacgacatagagcagtggttcacggaggacccaggcccggacgaagcgccgcgcatgcccgaggccgcgcctccagtggcaccagcaccggctgccccgactccagctgccccagccccggcgccatcgtggccgctgtcctcctcggtgccgagccaaaagacgtaccagggatcgtatggtttccggctgggattccttcattccgggacggccaagagcgtgacttgcacctactcccctgcgctcaacaagatgttctgccagctcgctaagacttgccctgtgcagctgtgggtggatagcacccctccaccgggtacgagggttagagccatggcgatctacaaacaatcacagcacatgaccgaggtcgtcagacggtgcccccaccatgagagatgctcggattcggatggactggcacccccacaacaccttatccgggtggaaggcaacctgcgggtggaatacctcgatgaccgcaatactttccggcattcagtggtggtgccgtacgagccgccagaggtgggatcggattgtactaccattcactacaactacatgtgcaactcctcgtgcatgggaggcatgaatcggcgcccgatcctcactatcatcaccctcgaggactcgtccggaaacctgctgggcagaaactcgtttgaggtcagagtctgtgcctgtccgggacgggaccggcgcactgaagaggagaatctgagaaagaaaggagagccgcaccacgagctgccaccaggatccactaagcgagcgctgccgaacaacacctcgtcatcacctcagccgaagaagaagccgctggacggcgaatactttaccctccagatccggggtcgcgagcggttcgaaatgttcagggagcttaacgaggccctggagctgaaggacgcccaggcgggcaaagagccgggaggctcgcgggcgcactcatcgcacctgaagtcgaagaagggtcagagcacttcgcgccacaagaagttgatgttcaaaaccgagggaccagattcagac

SEQ ID NO: 20468 - DNA, 1179 bp, synthetic construct
  misc_feature 1..1179: note = source = /note="Description of Artificial Sequence: Synthetic coding sequence"
  source 1..1179: mol_type = other DNA
atggaggagccccagtccgacccttctgtggagcctcccctgtctcaggagaccttctctgatctgtggaagttactaccagagaacaacgtattgtcacccctaccttcacaggccatggatgatctcatgttatctcccgacgatattgagcagtggttcaccgaagatcctggcccagatgaagctcccaggatgccagaagcggctcctcccgtcgctccagcacccgctgctccaactcctgcggcacctgcccctgccccttcctggccattaagctcttccgttccaagtcagaagacttaccaggggtcttacgggttccgtctcgggttccttcatagcggaaccgcaaagagtgtcacttgtacctactctccggcactgaataagatgttctgtcagctggccaagacttgtccggttcagctttgggtggactcgaccccccctcccggaacacgggtccgagctatggccatttataagcagagccagcatatgaccgaggtcgtccggcgctgcccccatcacgaacgttgtagcgattctgatggactggcgccaccgcagcatctgataagagttgaggggaatttgcgggtggaatatcttgacgacaggaatacgttcagacacagtgttgtggtgccatatgagcctcccgaggttggcagtgactgtaccaccatacattataattacatgtgtaacagttcctgcatgggcggcatgaacaggcgtcctatccttactatcattacactcgaggacagctctggtaacctattgggccggaacagtttcgaggttagggtgtgcgcctgcccaggaagggatcgtcgaacggaagaggagaacttgagaaagaaaggcgagccccaccacgagctgcctccagggagtaccaaaagggcactcccgaataacactagttctagccctcagcctaaaaagaaacccctggatggagagtactttacgctccagatcagagggcgggagaggtttgagatgttcagagagctgaatgaggcactagagctgaaggacgcgcaagcgggcaaggaacctggaggctctagggcccattccagccacctgaaatctaagaaagggcagagcaccagtcgccacaaaaaactgatgttcaagactgaagggccagatagcgat

SEQ ID NO: 20469 - DNA, 1179 bp, synthetic construct
  misc_feature 1..1179: note = source = /note="Description of Artificial Sequence: Synthetic coding sequence"
  source 1..1179: mol_type = other DNA
atggaggaacctcagtccgacccctctgtagagccaccactgtctcaagagaccttctcggatctgtggaagctgctgcccgagaacaacgtcctgtcacctctgccatcgcaggctatggacgatctgatgctgagccctgatgatattgaacagtggttcaccgaggatccaggtcccgatgaagcccctaggatgccggaggccgcccctccagtagcacctgctcctgctgcccccactcccgctgccccagccccagcacctagttggccactgtcaagctcagttccttcccagaagacctatcaggggtcttacgggtttcgattaggattcctccacagcggtacagctaagtctgtgacgtgtacttactcccccgccctgaacaaaatgttctgtcagctagctaagacttgcccagtgcagctgtgggtcgactcgacgccaccacccgggaccagggttcgggccatggccatctacaagcaaagccagcatatgaccgaggtagtcaggcgatgtccccaccacgaaaggtgttccgacagtgatggcctggcacctccgcagcacctaatacgcgtagagggcaatctcagggtagagtatctcgacgaccggaatacatttaggcactccgttgtcgtgccctatgaaccaccagaggtgggatcagactgcaccaccattcactataactatatgtgtaattcaagttgcatgggcggcatgaataggagacctatcttaactataatcactctggaagacagcagtgggaatttactggggcggaattccttcgaggtgcgcgtgtgtgcatgccctggcagggaccgaagaactgaggaagaaaacttgcgcaaaaagggcgaaccacaccacgagctgcctcccggctcgacgaaacgcgctctacctaataatacatcttccagcccacagcccaagaagaaaccactggatggggaatatttcaccctgcagatccgcgggcgggaacggttcgagatgtttcgcgaactgaatgaggcactggagctgaaggatgctcaggcgggaaaagaacccggcggttctagagcgcattctagtcacctgaaatccaaaaagggtcagtcaacctctaggcacaagaaattgatgttcaaaacagagggtccagattcagac

SEQ ID NO: 20470 - DNA, 1179 bp, synthetic construct
  misc_feature 1..1179: note = source = /note="Description of Artificial Sequence: Synthetic coding sequence"
  source 1..1179: mol_type = other DNA
atggaagaaccacaatcagatccttctgtcgaacctccacttagtcaagaaacttttagtgatctttggaaacttttaccagaaaataatgttctttctccacttccatcacaagcaatggatgatcttatgttatcaccagacgatattgaacaatggtttactgaagacccaggtccagatgaagcaccaagaatgccagaagctgcacctccagtagctcctgctccagcagcacctactcctgctgcacctgcaccagcaccatcttggccattatcaagttcagttccatcacaaaagacatatcaaggaagttatggtttccgtttaggttttttacactcgggtacagctaagtcagtgacatgtacatatagtcctgcacttaataaaatgttttgtcaactagctaaaacttgtccagtacaattatgggtagattcaaccccaccaccaggtacaagagttcgtgctatggcaatatataaacaatcacaacatatgactgaggtagtaagaagatgtccacatcatgaacgatgttctgattcagatggattagcaccaccacaacatcttataagagtagaaggaaatttaagagtcgaatatcttgatgatagaaatacttttagacattctgttgttgtcccatatgaacctccagaagtgggaagtgattgtactactattcattataattatatgtgcaattcgtcatgtatgggtggaatgaacagaagaccaatacttactataattactttagaagacagttccggaaatttattaggaagaaattcatttgaggttagagtttgtgcatgtccaggtagagatagaagaacagaagaagaaaatcttagaaagaaaggtgaaccacatcatgagcttccaccaggatcaacaaaaagagctttacctaataacacatcatctagtccacaaccaaaaaagaaaccacttgatggtgaatattttaccttacaaattaggggtcgtgaaagatttgaaatgtttagagaattaaatgaagcacttgaattaaaggatgcacaagctggaaaagaaccaggaggtagtagagcacatagtagtcatttaaagtcaaaaaaaggacaaagtacaagtagacataaaaagttaatgtttaaaactgaaggaccagactcagat

SEQ ID NO: 20471 - DNA, 1179 bp, synthetic construct
  misc_feature 1..1179: note = source = /note="Description of Artificial Sequence: Synthetic coding sequence"
  source 1..1179: mol_type = other DNA
atggaggaaccgcaaagcgatccttcggtcgagccgccactgtcccaagaaacgttctccgacctctggaaactgctgccagaaaacaacgtgctgtctccgctgccgagtcaggcgatggatgacctgatgctcagcccggacgacatagagcaatggtttaccgaggacccaggaccggacgaggcaccacgcatgccggaggccgctccgcctgtagctccagcaccagcggcgccgactcccgctgcccccgcccccgctccgtcatggcctttgtcgtcctcggtcccttcccagaaaacgtaccaaggatcgtacggttttcgcctgggtttcctgcactcaggaactgccaagtcagtgacctgcacctactcgcctgccctcaacaaaatgttctgccagctcgccaagacctgtcctgtccagctttgggtggattccactcctcccccgggaactcgggtgcgggcaatggcaatctacaagcagagccagcacatgaccgaagtcgtgcgcaggtgcccgcatcatgagcgctgctcagacagcgacgggttggccccaccgcagcatctgatccgggtggaaggaaaccttcgcgtcgaatacctcgacgaccggaatactttcagacactccgtggtggttccgtacgaacccccggaagtagggtcggattgcaccactatccactataactacatgtgcaattcgtcatgtatgggaggcatgaatcgtaggccgatcttgacgatcatcaccctggaggatagcagcggaaacctgctcgggaggaactccttcgaggtgcgggtgtgtgcgtgcccagggagggacagacggactgaggaagagaatctgcgcaagaagggcgagccacatcatgaactgccacctggaagtaccaagcgtgcactccctaataacacttcctcctcgcctcagccgaagaaaaagcccctggacggcgaatactttactctgcaaattagaggcagagaacggttcgagatgttccgggagctcaacgaagcactcgagctcaaggatgcccaggctggcaaagaacctggcggatcacgcgcccactcctcgcacctgaagtcaaagaaaggacagtcgacttcacgccacaagaagttgatgttcaagaccgaaggacccgattcggat

SEQ ID NO: 20472 - DNA, 1179 bp, synthetic construct
  misc_feature 1..1179: note = source = /note="Description of Artificial Sequence: Synthetic coding sequence"
  source 1..1179: mol_type = other DNA
atggaagaacctcagtccgatccatcagtggaacccccgctttcacaggaaaccttctcggatctctggaagctgctccccgaaaacaatgtccttagtcctcttccttcgcaggcgatggatgatctgatgctcagcccagacgacattgagcaatggtttaccgaagatcctggaccagatgaagcacctagaatgccagaggccgcgccccctgtggcccccgcaccggcagcacccactcctgcagcaccagcccctgctccaagctggccactttcatcctcggtcccttctcagaaaacttaccaagggtcctacggttttcgcctcggatttcttcactcggggactgcaaagtccgtgacttgtacctactccccagcacttaacaaaatgttctgccaactggcaaagacttgccctgtccagctttgggtggatagcactccacctcctggaaccagagtgcgtgcaatggccatttacaagcaatcacaacatatgacggaggtcgtgcggaggtgccctcaccatgaacgatgttcggactcggacggactggcccctcctcaacatcttattcgagtcgaaggtaatctgcgagtggaataccttgatgatcggaacaccttcaggcatagcgtcgtggtgccttacgaacctccagaagtcggaagtgattgtaccaccatacattacaactacatgtgtaactcgtcctgtatggggggcatgaatagacgtcccattctgacgatcataaccctcgaagattcgtcggggaacctcctgggtcgcaacagttttgaagtgcgcgtctgcgcatgtccgggtcgcgataggagaaccgaagaagaaaatctccggaagaagggggagcctcaccacgaactcccaccaggctcgaccaaaagggctcttcctaataacacttcttccagcccccaacctaaaaagaagcctctggatggggaatacttcacgctgcagatcagaggaagagagagatttgaaatgttccgggagcttaacgaagcactggaactcaaggatgcccaagcaggcaaggaaccaggcggatcgagggcacactcatcccacctgaagtcaaagaaaggtcagtcgacctcgcgtcataagaaacttatgttcaagactgagggtccagactccgat

SEQ ID NO: 20473 - DNA, 1179 bp, synthetic construct
  misc_feature 1..1179: note = source = /note="Description of Artificial Sequence: Synthetic coding sequence"
  source 1..1179: mol_type = other DNA
atggaagagccacagagtgatccctccgttgagccccccctgagccaggagacgtttagcgatttgtggaagctgcttccggaaaataacgtgctgtcacccctgccatctcaggccatggacgatctgatgctatcccccgacgacattgagcagtggttcacagaagatccggggcctgatgaggctccgcgaatgccagaggccgcaccaccagtcgcgcccgccccagccgcccctaccccggccgcgcccgctcctgccccttcttggcctttgagctctagtgtgccttctcagaagacgtaccagggctcctacggctttcgcctaggttttctccattccggtactgccaagtctgtgacttgtacatactcgcctgcactcaacaaaatgttttgtcagctggccaaaacctgccccgtccagttatgggtcgatagtacacccccccctggcacacgggtcagggccatggctatttataaacagtcgcagcacatgacagaggtcgtccgccgttgcccccaccatgaacgttgctctgactcggatggccttgctcctccccagcacctgatacgagtggagggcaacctgcgtgtagagtatctggatgatagaaataccttcaggcatagcgtggtggttccgtacgagccacctgaagtgggaagtgattgtaccacaattcattacaactacatgtgcaactcctcttgcatgggtgggatgaataggaggcctatcttgactataatcactctggaggactcatccggcaatctcctcggcaggaactctttcgaggtgcgagtgtgtgcctgtcccggtagggaccgcaggaccgaagaagaaaatctgcgcaagaagggcgagccccaccacgagctaccgccaggctctacaaagagagctctgccgaacaataccagcagctcgcctcagcctaaaaaaaagccactggacggagaatattttacgctacaaattcgaggccgcgaacggtttgagatgttcagagaactcaacgaggctctggaacttaaagacgctcaagccgggaaggagccaggaggatcccgggcccactctagtcatctgaaatctaagaagggccaaagcactagccgtcacaaaaagttgatgttcaagacagagggaccagattcagat

SEQ ID NO: 20474 - DNA, 1179 bp, synthetic construct
  misc_feature 1..1179: note = source = /note="Description of Artificial Sequence: Synthetic coding sequence"
  source 1..1179: mol_type = other DNA
atggaggaaccacagagcgacccctcagtcgaaccccctctcagccaggagacctttagcgacctgtggaaacttctgcctgagaataatgtgctaagtccgctgcctagccaagccatggatgacctcatgctatcacctgacgatatcgaacagtggtttacagaagatccgggaccagacgaggcccctaggatgccagaagctgcacccccagtggcgcctgcgccggccgcccccactcccgctgcccccgctccggccccctcctggcctcttagttcgtccgtcccttcccagaaaacctaccagggttcctacggcttccgcctgggcttcctacacagcggcacagctaaaagcgttacttgcacatacagcccagctctgaacaagatgttctgccagctagctaaaacgtgtccagtgcagctgtgggtggacagtacgcctcccccagggacacgagtaagggcgatggccatctacaaacagagccaacatatgaccgaggtggttcggaggtgtcctcatcatgaacggtgcagtgactcagatggcctggctcccccacagcatctgatcagagtggaggggaacctgcgggtggagtacctggatgataggaacacattcaggcattctgtggttgtgccttatgaaccgcctgaagtcgggagtgactgtactaccattcactacaactacatgtgcaacagcagctgcatgggcgggatgaacaggcgcccaattttgactatcataacgctggaagatagttctgggaatctgctcgggcgaaactctttcgaggttcgggtttgtgcttgtcctggccgggatcgcagaacggaggaagagaaccttaggaaaaagggagagccgcatcacgagctgcctcctggttctacgaagagagctttgccaaacaatacctccagcagcccgcagccaaagaaaaaaccattagatggggagtatttcaccctccagattcgtggaagagagcgctttgaaatgtttcgggaactgaacgaggccttagaactgaaagatgcccaggccggtaaggagcctggggggagtagggcccacagcagtcatctcaagtcaaaaaagggtcagtcaacaagtcggcataaaaaactgatgtttaagacagagggtcccgactctgac

SEQ ID NO: 20475 - DNA, 1179 bp, synthetic construct
  misc_feature 1..1179: note = source = /note="Description of Artificial Sequence: Synthetic coding sequence"
  source 1..1179: mol_type = other DNA
atggaagagccgcaatcagatccaagcgtggagcccccattgtcccaagaaaccttctcggatttgtggaagctcctcccagaaaacaatgtgctctctccactgccatcgcaggccatggatgatctcatgctctccccggacgatattgagcagtggttcactgaggacccgggcccagatgaggctccacggatgccagaggcagcgccgccagtcgctccggcgccggcagcacccacgccagcagcgccggcgccagcgccatcctggccgctctcatcctccgtgccgtcgcaaaagacttaccaaggatcctacgggtttcggctgggattcctgcatagcggtaccgcaaagtcggtgacttgcacgtacagccctgccctcaataagatgttctgccagcttgctaaaacctgcccggtgcagctgtgggttgactcaactcctccaccgggaaccagagtgcgcgccatggccatctacaagcaatcccagcacatgaccgaggtcgtgaggagatgtccacaccacgagagatgctccgactccgacggtctggcgcccccgcagcatctgatcagagtcgagggaaacctccgggtggagtacctcgatgaccggaatacctttaggcactcagtcgtggtcccttacgaaccaccagaagtgggttccgactgtacgactatccactacaactacatgtgtaattcgtcatgcatgggaggcatgaatagacggcctatcctgactatcatcaccttggaggacagctcgggaaatctgctgggacgcaacagctttgaagtgagagtgtgtgcctgccccggtagagataggcgtaccgaagaagagaacctgcgcaagaaaggtgagccacatcacgagctgccgcccggatccaccaagagagcactgccgaacaacacctcctcttccccccagccgaagaagaaaccactggatggcgaatacttcactctgcagattcgcggaagagaaaggtttgagatgttccgggaattgaatgaggctctggaactgaaggacgcccaggccggaaaagaacctggaggaagccgcgcccattcctcgcatctgaagtcaaagaagggccagagcacgtctcgccacaaaaagctgatgttcaagacggagggaccagactccgac

SEQ ID NO: 20476 - DNA, 1179 bp, synthetic construct
  misc_feature 1..1179: note = source = /note="Description of Artificial Sequence: Synthetic coding sequence"
  source 1..1179: mol_type = other DNA
atggaagaacctcagtccgacccttccgtcgaacctcctctttcacaagagactttttcggatctgtggaaacttctccctgagaataacgtgctctcgcctctcccctcgcaggcaatggatgatctgatgcttagcccagacgatatcgaacagtggttcaccgaagatcctggacctgatgaagcaccaaggatgccagaagccgcacctccagtggcgcccgcccctgcggcccccactccagccgcacctgcccctgcaccatcgtggccgctctccagctcagtgccctcacaaaagacgtaccagggatcatatggatttcgtcttggttttctgcactcggggaccgctaagagcgtcacctgcacgtactcgcctgcactgaacaagatgttttgtcaacttgcaaaaacctgtccagtccaactgtgggtggacagtaccccgccccctggtactagagtgagagcaatggctatttacaagcagagccagcacatgaccgaagtcgttcggaggtgcccgcatcacgagcgctgttccgattcggatggtcttgcccctccacagcatctcatccgcgtggaagggaatctccgggtggaatacctggatgataggaatacctttagacattcagtggtggtcccatacgagcctcccgaggtcggctcggattgtaccaccattcactacaactatatgtgtaactccagctgtatgggaggaatgaatcgacgaccaatcctcactattatcactctcgaagattcctcgggcaaccttctgggtcgcaacagctttgaggtgagggtgtgcgcgtgtccaggacgcgatagacggactgaagaggaaaacctccgaaagaagggcgagcctcatcacgaattgccgccaggatccactaagagagctctccctaacaatacctcgtcatccccccaacctaagaagaagcctctggacggagaatactttacccttcagatacgcggaagagaaagattcgagatgtttcgagaacttaacgaagctcttgaactcaaagacgcacaagcaggaaaggaacccggagggtcgagggcacattcctcgcatcttaagtccaaaaaaggtcagtccaccagtagacacaaaaagctcatgtttaagacggagggtccagattcggac

SEQ ID NO: 20477 - DNA, 1179 bp, synthetic construct
  misc_feature 1..1179: note = source = /note="Description of Artificial Sequence: Synthetic coding sequence"
  source 1..1179: mol_type = other DNA
atggaagagccgcagagtgatccgagcgtcgagccaccgttgagccaggagacgttctcggacctgtggaagctgctgccagagaacaacgtcctcagcccactgccgtcccaagcgatggacgaccttatgctgtccccagatgatatcgaacaatggttcaccgaagatccagggccagacgaagctccccgcatgcccgaggccgccccacctgtggccccagcccccgcggctccgactcctgcggcaccagcgccggcgccttcgtggcctctctcgagctctgttccatctcaaaaaacttatcaagggtcctacgggtttcggctcggcttcctgcactcgggaactgcaaagtccgtgacgtgtacttactcacccgctctcaacaaaatgttctgccagctcgctaagacctgcccggtgcagctctgggtggattctactccgcccccgggcactcgggtccgggcgatggctatttacaagcaatcccagcacatgaccgaggtggtgcgcagatgccctcatcacgagcggtgctcggactccgatggcctcgccccaccccagcacctcattcgcgtcgagggaaacttgcgcgtggaatacctggacgatagaaatacttttcgtcactccgtggtcgtgccctacgagcctccggaggtcgggtcggattgtaccacgatccattacaactacatgtgcaatagcagctgcatgggcgggatgaatcggcgtcctatcctgaccatcatcactctggaggactcgtcgggaaatctgctcggtcggaattcctttgaagtgcgagtgtgcgcgtgtccaggacgagatcggcgcactgaagaggaaaatctccggaagaagggagagccgcaccacgagctcccgccgggatccactaagagggctctgcctaacaacaccagctctagcccccagcctaaaaagaagcccctggacggagagtactttaccctgcagatccggggcagggaacgctttgaaatgttccgggaacttaacgaagcattggaattgaaagacgcacaagccggcaaggagccgggagggagcagagcccattcgagtcatcttaagtcgaagaagggacagagcacctcacggcataagaaacttatgtttaagaccgagggcccggactcggac

SEQ ID NO: 20478 - DNA, 1179 bp, synthetic construct
  misc_feature 1..1179: note = source = /note="Description of Artificial Sequence: Synthetic coding sequence"
  source 1..1179: mol_type = other DNA
atggaagaaccgcaatcagatcccagcgtggaaccgccgctctctcaggagactttctcagacctctggaaactcctgccagaaaacaacgtgttgtccccactgccttcacaagcaatggatgacctgatgctgagcccagatgatattgagcaatggttcacggaggacccgggaccagatgaagcgccgcgcatgccggaagcagccccaccagtggctccggcccccgcggccccaactccggccgcaccggcaccggctcctagctggccgctctcttcgtcggtcccgtcccaaaagacctaccagggcagctacggcttccggttgggcttcctccactcgggaaccgccaaatccgtgacctgcacttatagcccggcactcaacaagatgttctgccagctggccaaaacttgcccagtccagctctgggttgatagcacccctccgccaggaactcgcgtgcgcgccatggcgatctacaaacagtcacagcatatgaccgaagtggtgcgcaggtgcccgcaccatgaaagatgtagcgactcggacggcctcgcccctcctcaacatctgattagagtcgaaggcaatctccgcgtcgaatacctggacgaccgcaacactttccggcattctgtggtcgtgccatacgaaccgccggaagttggatcggattgcactaccatccattacaactacatgtgcaattcgtcctgtatgggtggcatgaatcgacgcccaatccttactatcattactttggaggactcatccgggaacctgctcggacgcaattcattcgaagttagggtttgcgcctgtccaggacgcgaccgtcggactgaggaagaaaatctgcgcaagaagggcgaaccgcaccatgagcttccgccaggaagcaccaagagggcgctgcccaacaatacttcgtcgtcaccccagccgaaaaagaagccactggatggagagtacttcacgttgcaaatccgcggacgagagagatttgaaatgtttagggaactgaacgaagccttggagctgaaggatgcgcaagctggaaaagagccaggagggtcgagagcccacagttcccatctgaagagcaagaagggacagtcaacttcgagacataagaagctcatgtttaagactgagggaccggactcagac

SEQ ID NO: 20479 - DNA, 1179 bp, synthetic construct
  misc_feature 1..1179: note = source = /note="Description of Artificial Sequence: Synthetic coding sequence"
  source 1..1179: mol_type = other DNA
atggaggagccacagtctgacccttctgtggaaccccctcttagtcaggagaccttttctgatctgtggaagttgctcccagagaacaatgtcctgagtccattgccaagtcaagctatggatgacctgatgctgagtccagatgacatagagcagtggttcacagaggatcctggccctgacgaggccccccggatgcctgaggctgcccctcctgttgcaccagcaccagcagccccaacacccgccgcccccgccccagcaccatcttggcccctctctagcagtgttccaagtcagaaaacttaccagggaagctacggctttaggctaggcttcctgcatagtgggacagccaaatcagtgacctgtacttattcaccagctctcaacaaaatgttttgccagctagccaagacatgccctgtgcaactgtgggttgactctactccacccccaggcacccgcgtgcgggctatggctatttacaagcagtctcagcacatgacagaagtggtgcggcgatgccctcatcatgaacgctgtagtgatagcgacgggctggctcccccacagcacctaatacgagtggagggtaatctgcgggtcgaataccttgacgatagaaatacctttcgtcactccgtggttgtgccatatgaaccaccagaggtcggatccgactgcacaacaattcactataattacatgtgtaatagttcttgcatggggggcatgaacaggagacccattctcaccataataacactggaagactcctctggcaatctgctcggcaggaacagttttgaggtaagagtgtgtgcctgtccgggcagagatcggaggacagaggaagaaaatctgcgtaagaagggggaaccccaccacgagctgccccccgggagtactaagcgagcactgcccaataataccagttcatcaccacaaccaaagaagaagccactggacggtgagtacttcaccctccaaatccgggggcgcgagcgtttcgaaatgtttcgggagttaaatgaggccttggagctaaaggatgcccaggcaggaaaagagccaggcgggtcacgggcccattcaagccacctgaagagcaagaagggtcagtctacatctcgccacaagaaactgatgttcaaaacagagggcccagacagtgat

SEQ ID NO: 20480 - DNA, 1179 bp, synthetic construct
  misc_feature 1..1179: note = source = /note="Description of Artificial Sequence: Synthetic coding sequence"
  source 1..1179: mol_type = other DNA
atggaagagccacagtcagatcctagcgtggaacctcctttatcacaggaaaccttctcagatctgtggaaactcttaccagagaacaacgtcctgagtcctctgccatcacaggccatggatgacttaatgctgagcccagatgatatcgaacaatggttcaccgaagatccaggtccagacgaagctcctcgcatgcctgaggctgcacccccagtggcaccagctcctgcggccccgactcccgctgcccccgctcctgcacccagctggccgctttctagctctgttcccagccagaagacatatcaaggatcttacggattcagactgggcttcctgcatagcggcaccgctaagtctgtgacttgcacgtactcacctgccctgaacaaaatgttttgccagctggccaagacatgtccagttcagctctgggtcgactccactccacctccaggaacacgtgtccgggccatggcaatatacaagcaaagtcagcacatgaccgaggtcgtgagacggtgccctcatcacgagaggtgtagcgactctgacgggctggccccacctcaacaccttatacgggtggaaggtaatctgagagtggaatacctggatgacagaaatacttttcgccacagcgtcgttgtgccttatgagcctcccgaagtgggctctgactgcacaactattcattacaactacatgtgcaacagcagctgcatgggaggaatgaacagaagacccattttgactatcattacactggaagactcatcaggcaaccttctcgggcgcaatagctttgaggtccgtgtgtgcgcttgccccggacgagataggcgcaccgaggaagaaaacctcaggaaaaagggagaaccgcaccacgaactgccccctggtagtactaagcgtgctctcccgaataacaccagcagctcaccacagcctaagaagaaacctctggacggtgagtacttcaccctgcagatccgcggacgcgaaagatttgagatgttccgcgagctcaatgaggcccttgagctgaaggatgcccaggccggaaaggaaccaggagggagtagagctcatagtagtcatctcaaaagcaaaaaaggccagagcactagccgccacaaaaaattgatgtttaagaccgagggcccagattccgac

SEQ ID NO: 20481 - DNA, 1179 bp, synthetic construct
  misc_feature 1..1179: note = source = /note="Description of Artificial Sequence: Synthetic coding sequence"
  source 1..1179: mol_type = other DNA
atggaagagccacaatcggaccccagcgtagaaccacctctctctcaggaaaccttctccgacttatggaagcttctccccgaaaacaatgtattgagccccctgccgtctcaggctatggatgacctgatgttaagcccagatgacattgagcagtggtttacagaggaccctggtcccgatgaagcccccagaatgcctgaggctgcgccgccagttgcacctgcccctgccgcccctacccccgccgctccggccccggccccctcatggcccctgtcttcttccgtcccctcacagaagacttaccagggaagctatggattccgcctcggctttctccacagcggcaccgcgaaatcagtaacttgcacatactcccctgcactaaataagatgttctgtcagctggccaaaacttgcccagtccagttatgggtggattccacaccaccaccaggcactcgggtgagagccatggcaatctacaaacaaagtcagcatatgacagaggtggtgaggcgatgccctcaccacgagcggtgctcagattcagacggtttagcccccccccagcatctcatccgtgtggagggcaatctgagagttgaatatttggacgacaggaacacctttaggcactcggttgtggtcccttatgaacctccggaggtgggcagcgattgtactacaatccactataactacatgtgcaattcctcctgcatgggggggatgaaccggagacccatattgactatcataactttggaagatagtagtggaaatctgctgggtcgtaattcgttcgaggttagggtgtgtgcctgccccgggagggatcgacggacagaagaggagaatcttcgaaagaagggagaaccccatcacgagctacctcccgggtccacgaagagggccctaccaaataacactagtagctcgcctcagccgaaaaagaaacctcttgatggggagtactttactttgcagattcggggccgtgaacgattcgagatgttccgagagctcaacgaggctctggagttaaaggatgcccaagccggaaaggaacccggaggaagtagggcccacagtagccacctgaaatctaagaagggccagagtacttcacgacataagaaactcatgttcaaaaccgagggacctgatagcgac

SEQ ID NO: 20482 - DNA, 1179 bp, synthetic construct
  misc_feature 1..1179: note = source = /note="Description of Artificial Sequence: Synthetic coding sequence"
  source 1..1179: mol_type = other DNA
atggaagaaccacaatccgacccctcggtcgagccacccttatcacaagaaaccttctcggatctctggaaactcctcccagaaaataacgtcctctccccactgccctcccaggccatggacgatttgatgctgtctccagatgacattgaacagtggttcacggaggacccagggccggacgaggctcccaggatgccagaggcggctcctcctgtcgcccccgcacccgctgctcctacgccggccgcgccagcgcctgcaccttcgtggcctctcagcagttcagtgccatcccagaaaacttatcagggtagctacggtttccgcctcggcttcctccactcagggacagccaagtctgttacatgtacctattcccctgcactgaacaagatgttctgccagttggctaagacctgccctgtacagttgtgggtggattccaccccacctcctggcacacgcgtccgggccatggctatttataaacagagtcaacatatgaccgaagtcgtccgccggtgcccacatcacgagagatgtagtgactcggacggcctagcacccccccagcacctgatccgcgtggagggcaatttgagggtagaatatctagacgaccgcaacacctttcgccactcggttgttgtcccctacgaacccccagaagttggcagcgactgtacaacaattcattataattatatgtgtaacagcagctgcatgggaggcatgaaccgacggcccatcctgactattattaccctcgaagattcctctggcaatctcctcggacgcaacagcttcgaggtgagggtttgcgcctgcccagggcgagaccggcgcaccgaggaagagaatctccggaagaagggggagccccatcatgagttaccccctgggagcactaagagggctctgcccaacaatacatcctcatctcctcagccaaagaagaaaccactggacggtgaatacttcacgctacaaatccgtggccgcgagcgtttcgaaatgttccgggagctgaacgaagcgctggaactgaaagacgcgcaggctggcaaagaacccggcggatcgagggcgcactcatctcatctgaaatccaagaagggccagtctacttctcgccataagaaactgatgtttaagactgaaggtccggatagtgac

SEQ ID NO: 20483 - DNA, 1179 bp, synthetic construct
  misc_feature 1..1179: note = source = /note="Description of Artificial Sequence: Synthetic coding sequence"
  source 1..1179: mol_type = other DNA
atggaagagccacagagtgatccatcagtcgagcctccgctgtcgcaggagacgttttccgatttgtggaagctgctacccgagaataatgtcctgtctccactgccttcacaggctatggacgacttgatgctgtctcctgatgatatcgagcagtggttcaccgaagacccgggacccgacgaggccccacgcatgccggaggccgcccctccggttgctcctgcacctgccgcacctacaccagctgctcctgcgcctgctcctagctggccactcagctcaagtgttccatcacaaaagacctaccagggcagctatggttttcggctgggattcctgcactcaggtactgcgaaatcagtcacctgcacgtattcacccgccctgaacaaaatgttttgccaactagccaaaacatgtccagtgcaactttgggtcgatagcacaccccctcctgggaccagagtgcgcgcaatggccatctacaagcagagccagcacatgacagaggtagtcagaaggtgcccacatcacgagcgatgtagtgatagcgacggcctagctccccctcagcatctcatccgagtggagggaaacctgcgagtggaatacctcgacgaccggaacaccttccgccattcggtagtggttccctatgaaccaccagaggtcggtagcgattgcaccacaatccattataactacatgtgtaactcctcttgcatgggcggaatgaaccggcgacctatcttgaccattataaccttggaagattcttctgggaacctcctaggccgcaattcatttgaggtgcgcgtctgtgcatgtcctgggcgggatcgtcgaactgaagaagaaaatctcaggaaaaagggcgaaccacaccatgagctgccaccaggatcaactaaaagggccctgcccaacaatacttcctccagtccccagcccaagaaaaagccactggacggagagtatttcacactacaaatacgcgggcgagaaagatttgagatgtttagagagctgaatgaggccctagagctgaaagacgctcaagccgggaaggagccaggtgggtctcgtgcacatagctcacatttgaagagtaagaaagggcaaagcacctccagacataagaagcttatgttcaagactgaggggcctgatagtgac

SEQ ID NO: 20484 - DNA, 1179 bp, synthetic construct
  misc_feature 1..1179: note = source = /note="Description of Artificial Sequence: Synthetic coding sequence"
  source 1..1179: mol_type = other DNA
atggaagaacctcagagtgatccgagcgttgaaccaccgttaagccaggaaaccttctccgacttatggaaactacttcctgagaacaatgtgctgtccccgctgccctcgcaagcaatggatgatctcatgttgagcccagatgatatcgagcagtggttcaccgaagaccctggccctgatgaggccccacggatgcccgaggcggcgccgcccgtggctcccgcccctgcagcacccacccctgcggcccccgcccccgcgccatcctggcccctgtccagttcggtgccatcccaaaagacgtatcaaggatcctacggcttccgcctgggattcttgcacagcggcactgccaaatcagtcacctgcacctactcccccgctctgaacaaaatgttctgtcagttggcaaagacatgcccagttcaactgtgggtcgattcaaccccgccgcccgggacccgagttcgggccatggccatatacaagcagagtcagcacatgacggaggtggtgcggcgttgcccacatcacgaaaggtgttcggattcggatggactcgcgccgccccagcacctaattcgcgttgagggcaacctgagggtcgagtacttagatgaccgcaacacgtttcgccatagtgttgtcgtcccgtacgagcccccggaggtcggctccgattgcacgacaatccactataattacatgtgcaatagcagttgtatgggcggcatgaaccgacgccctatcctgacgatcattacgttggaagattccagtggaaacctgctggggcgcaacagtttcgaggtgcgtgtgtgcgcgtgcccggggcgtgatcgcaggacggaagaggaaaatctgcgcaagaaaggcgaaccccaccacgaattgccaccagggtccacgaagcgagccttgcccaacaacacgagttcatccccccaaccgaaaaaaaagccgctcgatggcgagtacttcactctgcagattcgcgggagagaacgttttgagatgttcagggagctaaacgaggccctggagttgaaagatgcgcaagcgggcaaagaacccggaggttcccgggcccattcctcgcacctgaagtccaagaagggtcaatctacctcccggcacaagaagctgatgttcaagaccgagggaccggactcggat

SEQ ID NO: 20485 - DNA, 1179 bp, synthetic construct
  misc_feature 1..1179: note = source = /note="Description of Artificial Sequence: Synthetic coding sequence"
  source 1..1179: mol_type = other DNA
atggaggaaccacagagtgacccctcggtggagcctccgttatcgcaggagactttctctgacctgtggaagttactgccagaaaacaacgtgttaagtccactgcctagccaggctatggacgatcttatgctctcccctgatgacatcgaacagtggttcacggaagaccctggtccggacgaagccccacggatgcccgaggccgcacccccggtcgcccctgctcccgcggctccgacccccgctgcacctgccccggcgccaagctggcccctgagctctagcgtcccctcacagaagacttatcagggctcctacggctttaggcttggcttcctccatagtgggacggctaagtccgttacgtgtacctattcccccgcccttaacaagatgttctgccagctggccaaaacctgcccggtccagctgtgggtcgattcaaccccacctcctggcacacgcgtgcgcgcgatggcaatatacaaacagtcgcaacacatgaccgaggtcgtgagacgctgtccccatcatgagagatgctccgattcggatggcctggctccgccgcagcacttgatcagagttgaagggaatttaagggtggagtaccttgacgatcgaaacacatttaggcatagcgtggtggtcccttacgaaccgccagaagtggggagcgattgtacaacaattcattacaattacatgtgcaattctagctgcatgggagggatgaatcgccgtccaatccttacaatcatcaccttggaggacagttcaggcaacctactggggcgaaattcctttgaggtgcgtgtctgcgcctgccctggccgggaccgtaggacagaagaggaaaacttgcgcaagaagggtgagccacatcacgagttgccgcctggcagtactaaacgcgctctgcccaacaacactagcagctctcctcagccaaaaaaaaagccattggacggggagtacttcaccttacagataaggggtagggagagatttgagatgttccgggagttgaacgaggcactggagctcaaggatgcacaggctggcaaagaacccgggggttcacgagcacattcgtctcacctgaaatcaaagaagggacaaagcacttcacggcacaagaaactgatgtttaaaacagagggccctgactctgac

SEQ ID NO: 20486 - DNA, 1179 bp, synthetic construct
  misc_feature 1..1179: note = source = /note="Description of Artificial Sequence: Synthetic coding sequence"
  source 1..1179: mol_type = other DNA
atggaagaacctcaatccgacccttcagtcgagccaccactttcgcaagagaccttcagcgatctgtggaagttgctgccggagaataacgtgttgtcgcctcttccttcccaagcgatggacgatctgatgctaagtccagatgatattgagcagtggtttacagaagaccccggtcctgacgaagctcctcggatgcccgaagccgcacctcctgttgcaccggctccagctgctccaacccctgcagcacccgcgccagcaccgagttggccactgtcttcttctgttccttcccaaaaaacctatcaaggaagttatggatttaggctcggcttccttcactccggaactgctaagtctgttacatgtacttactcgcccgcccttaataaaatgttctgtcaattggctaagacctgtccagtgcagctttgggtcgatagtactccaccgcctggtaccagggttcgggcaatggccatctataagcaatcacagcacatgaccgaagtggtgagaaggtgccctcatcatgagaggtgctcagattcagacgggctcgcacctccacaacatctaattcgcgtggagggtaacttgagggtcgagtatctcgacgacaggaacacttttagacatagtgtggttgtgccatatgaaccccctgaggttggtagtgattgtactaccatacattacaactacatgtgcaatagctcgtgcatgggaggtatgaacagacgaccaatactcaccattattacattggaagactcttccgggaatttgctcggtaggaattctttcgaggttcgagtttgcgcttgccctgggagagatcgtagaaccgaggaggagaaccttcgtaaaaagggtgagccccaccacgaacttcctcctggttctactaaacgcgctctgccaaacaacacatcgtcttccccccagcctaagaaaaagcctcttgatggcgaatacttcacactgcaaatcaggggccgagaaaggttcgagatgtttagagagctcaatgaagctttggagcttaaagatgcccaggctggaaaagagccaggaggttctagagctcatagctcccatcttaagtcaaaaaagggtcaaagcacctctcgtcataagaaattaatgttcaagacagagggtccagattccgac

SEQ ID NO: 20487 - DNA, 1179 bp, synthetic construct
  misc_feature 1..1179: note = source = /note="Description of Artificial Sequence: Synthetic coding sequence"
  source 1..1179: mol_type = other DNA
atggaggaacctcagagtgatccttctgtagaaccaccactttctcaggaaactttctcagatctctggaaattactccctgaaaataatgttttgtctcccctcccctcacaggctatggacgacctcatgttgagtcccgatgatatcgaacagtggtttacagaagatcctggacctgatgaagccccgcggatgcctgaggcagccccacctgtcgcacccgcccctgcggccccaactcctgcagctcccgcccccgccccatcttggcccctatccagtagtgtgccatcccagaagacttatcaggggtcttatgggtttcggctgggatttctgcactccgggacagctaaaagtgtaacatgtacttatagtcccgcgctgaataaaatgttctgccagctcgccaaaacatgccccgtccagctctgggtggatagtacacccccacccgggacacgtgtaagagctatggccatttataaacagtctcagcatatgactgaagtggtaaggagatgccctcaccacgaacggtgctcagattccgatggactggcccccccccagcacctgataagggtggaaggaaatctgagggtggaatatctggacgatagaaacacttttaggcattcagtggtggtcccctatgaacctcccgaagtcgggtccgattgtacaactattcactacaactatatgtgtaattcttcttgtatggggggaatgaatcggagacccatattaacaatcataacactcgaggattcctctggaaacctccttgggcgcaatagttttgaagtgagagtctgcgcatgtcctgggcgggatcgccgaacagaggaagagaacctcaggaagaaaggggaaccccaccatgaactccctcccgggtctacaaaaagggcactccccaacaacacatcttctagtcctcagcccaaaaaaaaacctctggacggagaatatttcacactccagataaggggaagagaaagattcgaaatgtttcgggaacttaatgaagctctggaattaaaagatgctcaggcaggaaaagaacctggagggtctcgggcacactcttctcatttaaaaagtaaaaaggggcagtccacttcccggcacaaaaagctgatgtttaaaacagaagggcccgattctgat

SEQ ID NO: 20488 - DNA, 1179 bp, synthetic construct
  misc_feature 1..1179: note = source = /note="Description of Artificial Sequence: Synthetic coding sequence"
  source 1..1179: mol_type = other DNA
atggaggagccacagtctgacccaagcgtggagcctcccttatcccaagagacgtttagcgacctgtggaaactgctgccggagaacaatgtgctctcccccctgccatctcaggccatggatgacctgatgctctcccccgatgatattgaacaatggtttacagaagacccaggacccgatgaggcaccccgcatgcccgaagccgcacccccagtcgctcctgccccggccgctcctacaccagcggcgccggcccccgcaccaagctggcctctatcgtcgtcggttccgtctcagaagacgtaccagggatcctatggtttccgcctggggtttttgcactccggcacggcgaagagtgtgacctgtacctacagcccagccctcaataaaatgttctgccagctggcaaagacctgccctgttcaattgtgggtggattccacaccgccaccgggaacccgagtccgggcaatggccatatacaagcagtcgcaacacatgaccgaggtggtgagacgatgtccccatcacgagcgctgctctgactctgacggcttggccccccctcagcacctgatccgagttgaggggaatctccgagtggagtacctggacgatcggaatacctttcgccactcggtggtagtcccttacgagccacctgaggtcggctccgattgtaccaccatccactacaactatatgtgcaactcaagctgcatggggggtatgaataggcgtcctattctgactatcatcacattggaggattcctcgggtaaccttttaggacggaactcctttgaagttcgggtgtgtgcctgccctggacgtgatcggcgcaccgaagaggagaatcttagaaaaaagggcgaaccccaccacgaactcccaccaggcagcaccaagcgggctctccccaataatacctcaagctcaccgcaacctaaaaagaagccattggatggtgagtatttcaccctccagattcgcggtcgggagaggtttgaaatgttcagggagctgaatgaagcgctagaactgaaagacgcccaggccgggaaggaaccaggagggagccgtgcacactcgtcccatttgaaaagtaagaaggggcagtccacttcacgtcataagaaactcatgtttaagacagaggggcctgactctgat

SEQ ID NO: 20489 - DNA, 1179 bp, synthetic construct
  misc_feature 1..1179: note = source = /note="Description of Artificial Sequence: Synthetic coding sequence"
  source 1..1179: mol_type = other DNA
atggaggagccacagagtgatccgtctgtagaacccccgctctcgcaggagaccttctccgacctctggaagctcttgcccgagaacaacgtgctctcccctctccccagtcaggcaatggatgacctgatgctttcccccgatgatatagaacagtggttcacggaggaccctgggcctgatgaagcgcccagaatgcctgaggccgcaccccccgtcgcacctgcgcccgctgcgcccacaccagccgctcccgcacccgcccccagttggcctctgagctcctctgtgccctcccaaaaaacatatcagggatcttacggatttcggctgggattcctgcacagcggcactgccaaatctgtcacttgcacttactctccagccctgaacaagatgttctgccagttggcaaagacttgccctgtccagctatgggtggattcgacccctccacccggcacacgagtgagagccatggcaatttataagcaaagtcagcacatgacggaagtcgtgcggcgatgtccccaccacgagagatgctcagattccgacggactagcacccccccaacacttgattcgagtggaagggaatctgagggtggagtatcttgacgatagaaatacatttcgtcacagcgttgtggtaccctacgaaccaccagaggtcggcagcgactgcactactatacattacaactatatgtgtaattccagttgtatgggaggcatgaatcgacgtccgatccttaccattataactctggaggattctagcggcaacttactaggacgcaatagcttcgaggtgagggtctgtgcatgccctggcagagacaggcgaaccgaagaggaaaacttgcgcaaaaagggcgagccccaccatgagttgccccccggatccaccaagcgagccttaccaaataacacctccagctcccctcaacctaagaagaagcctcttgacggcgagtactttacactgcaaattcggggccgcgagcgtttcgagatgtttcgcgaactcaatgaggcactggaattgaaggacgcccaggccgggaaagagccaggcgggtctagggctcactcaagccacctgaaatcaaaaaaaggacagagtactagcaggcataaaaagttaatgttcaaaactgaggggccggatagtgac

SEQ ID NO: 20490 - DNA, 1179 bp, synthetic construct
  misc_feature 1..1179: note = source = /note="Description of Artificial Sequence: Synthetic coding sequence"
  source 1..1179: mol_type = other DNA
atggaggaaccgcagtcggacccatccgtcgagccccctttgtcccaggaaactttttcggatctttggaagttgctgcccgagaacaacgtccttagcccactgccgagccaagctatggatgatctgatgctgtcgccggatgacatcgagcaatggttcacagaggatcccggtcccgacgaagcgccccggatgccggaagctgccccccccgtcgcaccagctcccgctgctcctacccccgccgcccccgcccctgccccgtcttggccgctcagcagctccgtgccctcgcagaagacgtaccagggctcgtatggtttcagactaggttttcttcactccggaaccgccaagtcagttacttgcacttactcacctgcgctgaacaagatgttttgccagctggccaaaacctgtcctgtgcagctgtgggttgacagtacgcccccccctggaacccgcgtccgcgccatggcgatttacaagcagagccaacacatgaccgaggtggtacgtcgctgtccacaccatgaacgatgtagcgactccgatggtttggcgccaccccagcacctcatccgagtcgagggaaacctccgcgtggaatacctggacgaccggaatactttccgccactctgttgtcgtgccctacgagccgccggaagttggcagcgattgtaccaccatccactacaactacatgtgtaatagttcctgcatgggaggcatgaatcgccggcccattcttaccatcatcaccttggaggattcttccggtaatctacttggacgtaattctttcgaggtgcgagtctgcgcatgtcccggacgcgatcgtcgtacggaggaggagaacttgcggaagaagggagagccccaccatgagttgccacctggttccaccaagcgcgctttacccaacaacacgtcttcgtcgccccagccgaagaagaagccattggacggcgagtacttcacccttcaaatccgtggacgtgaacgcttcgaaatgtttcgtgagttgaacgaggctctggaattgaaggatgctcaggcgggtaaagaacccggcggtagtcgcgctcattcatcccacctcaagtccaagaagggccagagtacgtctcgccacaagaagctaatgtttaagaccgaggggcctgacagcgat

SEQ ID NO: 20491 - DNA, 1179 bp, synthetic construct
  misc_feature 1..1179: note = source = /note="Description of Artificial Sequence: Synthetic coding sequence"
  source 1..1179: mol_type = other DNA
atggaagagccacagtcggatccttccgtggaaccaccgctttcccaggagacttttagcgacctgtggaaacttcttcctgagaacaatgtgcttagccctctcccttcgcaggccatggatgacctgatgctttcacctgatgatattgagcagtggtttactgaggaccctggtcctgatgaagcgccaagaatgccagaggcagcacctcctgtcgcaccagcacctgcagccccaaccccggctgcaccggcgcccgcaccttcgtggcctctctcctcttcagtgccatcgcagaaaacctaccaaggaagctacggttttagactgggattcctgcattccgggaccgcaaagtccgtgacctgcacgtactcccctgcgctgaacaaaatgttttgccaactggcaaagacctgccctgtgcagttgtgggtggatagcaccccaccaccaggcactcgcgtgcgtgcaatggccatctacaagcaatcgcagcatatgactgaagtggtgcgtcggtgtcctcaccatgagagatgttcagactcagatggcctcgctccaccacaacatcttatacgggtcgaaggaaacctgagagtcgagtaccttgacgaccggaacacttttcgccattcggttgtggtgccctacgaaccgccagaagtgggtagcgattgcaccactatccactacaactacatgtgcaactcctcctgcatgggcggaatgaatcgccgtcctatccttaccattatcaccctcgaagattcctcgggaaacctgcttggtcggaactccttcgaagtgcgagtgtgcgcgtgtccaggtcgtgaccgcaggactgaagaagaaaacctgcgcaagaagggagaaccacatcacgaactgcctcctggatcaactaagagagcactgcccaacaatacttcaagctcacctcaacctaaaaagaagcctcttgacggagagtactttacgcttcaaattcgaggaagggaacgctttgaaatgtttcgcgaattgaacgaggccttggagctgaaggatgcccaagcaggcaaggaacctgggggctcacgagcccacagctcacatttgaagagcaagaaaggacaaagcacgtcaaggcataagaagctgatgttcaagaccgaaggtccggattcagat

SEQ ID NO: 20492 - DNA, 1179 bp, synthetic construct
  misc_feature 1..1179: note = source = /note="Description of Artificial Sequence: Synthetic coding sequence"
  source 1..1179: mol_type = other DNA
atggaagaaccgcaaagcgaccccagcgtggaacctccgctgagtcaggaaactttctccgatctctggaagttgctgcctgagaacaacgtgctcagcccgctgccttcccaagcaatggacgatcttatgctgagcccggatgatatcgagcagtggttcactgaggacccaggccctgatgaggcaccacggatgcctgaggctgctcctccggtggcgccggccccagccgcgccaaccccagctgctccagcccccgccccgtcctggcctctgtccagctcagtgccatcgcaaaagacttaccagggatcctacgggtttaggctcggctttcttcactcagggactgccaagtccgtgacctgcacctatagcccggcgctgaacaaaatgttctgtcagctggcgaaaacttgtccggtccagctgtgggtcgacagcacccctccaccgggcactagggtgagggccatggcaatctacaagcaatcccagcatatgacggaagttgtgaggagatgcccgcatcacgagcggtgctccgacagcgacggcctggcgcctccgcagcacctcattcgggttgagggaaatctccgcgtggagtaccttgacgacaggaacaccttcaggcactctgtggtggtgccttacgaaccgccggaagtaggttccgattgtactaccattcactacaactacatgtgcaactcctcttgcatgggtggaatgaaccggcgccccattctgactattatcaccttggaggatagcagcggcaacctgctgggtcgcaattcatttgaagtcagagtgtgcgcatgccccggacgcgaccggcgcactgaggaggaaaacctccggaagaaaggagaaccacaccatgaactcccaccagggtccaccaagcgggctctcccgaacaatacgtcctcgagcccgcagcccaagaaaaagccgctcgacggggagtacttcaccctgcaaatccggggtagggagcgcttcgaaatgttccgggagctgaatgaagctctggagcttaaggacgcccaggcgggaaaggagccaggcggatccagagcccattcgtcgcacctgaagagcaagaagggccaaagcacctcacggcacaaaaagctcatgttcaaaaccgaaggaccggactccgac

SEQ ID NO: 20493 - DNA, 1179 bp, synthetic construct
  misc_feature 1..1179: note = source = /note="Description of Artificial Sequence: Synthetic coding sequence"
  source 1..1179: mol_type = other DNA
atggaagaaccgcagagcgacccatctgttgaaccgccacttagtcaggagactttctcagacctctggaaacttctccccgaaaacaatgtcctgtcgccccttccaagtcaggccatggacgatttgatgctgagccccgacgatatcgaacagtggtttactgaggacccagggccggacgaagctccaagaatgcctgaagctgctccccccgtcgcaccagcacccgcggccccaaccccggctgcaccagcacccgctccatcctggcccctttccagctcagtgccgagccagaaaacttaccaggggtcctatggcttcagactcggcttcttgcacagtggtacagccaaatcagtgacatgcacctacagtccagctctcaacaagatgttttgccagctggccaagacttgccccgtgcagctgtgggttgattcaacaccccctcccggaacccgggtgcgggctatggccatctacaagcagagtcagcatatgaccgaggtcgtaagaaggtgtcctcaccacgagaggtgtagcgacagtgacgggctcgccccaccccagcatctgatcagagtagaaggtaatctgagagtggaataccttgacgatcggaacacattccggcatagtgtggtggtaccctatgaaccacctgaagttggctccgattgcaccaccatccactacaattatatgtgtaatagcagctgcatggggggaatgaatcgccgaccaatcctaacaatcattaccctcgaggattcgtccgggaacctgctgggccgtaactcattcgaggtacgcgtctgtgcatgccccggaagggaccggcgaaccgaagaggagaacttgcgtaagaaaggtgaacctcatcatgagctgcccccaggctccaccaaacgagccttacccaacaatacgtcctccagcccccagccaaagaagaaacctctggacggcgaatatttcacactccaaattagaggccgggagcgatttgagatgttccgcgagctgaacgaagccctcgagcttaaagatgcccaggctggtaaagagccgggcggaagccgcgcccactcttcacatcttaaaagcaagaaagggcagtccaccagtcgacacaagaaacttatgtttaaaactgaggggcccgactctgac

SEQ ID NO: 20494 - DNA, 1179 bp, synthetic construct
  misc_feature 1..1179: note = source = /note="Description of Artificial Sequence: Synthetic coding sequence"
  source 1..1179: mol_type = other DNA
atggaagaacctcaatcggacccgagcgtcgagcccccactgtcccaggagacatttagcgacttgtggaagttgttgccagagaataacgttctgtcccccctgccgagccaggccatggacgacctgatgctctctccagatgatatcgaacagtggtttactgaggatccggggcccgatgaagcgccacggatgccggaggccgctccccccgtcgcgccagctcccgccgcacccacgcctgccgcccctgctcctgccccatcatggcctctgtctagttctgtcccctcacagaaaacatatcagggcagctacgggtttcgtctgggatttctgcactcaggaactgccaaaagcgtcacttgtacctactcaccggcgctgaataaaatgttttgccagctagctaagacatgcccagtgcagctgtgggtggattccaccccacccccagggacaagagtgcgcgccatggccatatataagcagtctcagcacatgaccgaggtagtacggcgatgcccacaccacgagcgatgcagtgactcagacggattggccccaccacagcatctcatccgtgtggaggggaacttgcgggtcgaatatctggacgacagaaacaccttcaggcattctgttgtggtgccgtacgaacctcccgaggttgggagcgattgtactacgatccattacaattacatgtgcaactccagctgtatgggtggaatgaataggcgcccaattctgactattattacactggaggactcctccgggaatctcttgggcaggaactcttttgaagtccgagtgtgtgcctgtcccggccgagacaggcgaaccgaagaggaaaacctgaggaaaaagggagaaccacatcatgagctaccgcctgggtctaccaagagggccctgcctaacaatacaagtagttctccacagcccaaaaagaaaccattggatggtgagtattttacgctgcagattcgaggtcgtgaacggttcgagatgtttagagagctaaatgaggctctggaactgaaggacgcccaggctggaaaggaaccgggcgggtccagggcccatagctcccatctcaagtctaaaaaggggcaatctacttcccgccacaaaaaactcatgtttaagaccgaagggccagacagtgac

SEQ ID NO: 20495 - DNA, 1179 bp, synthetic construct
  misc_feature 1..1179: note = source = /note="Description of Artificial Sequence: Synthetic coding sequence"
  source 1..1179: mol_type = other DNA
atggaagaacctcagtcggacccatcggtcgaaccgccgctctcgcaggagactttctccgacctgtggaaactgctgccggagaataacgtcctgagcccactgccgtcacaggcaatggacgatctgatgctttctccggacgatatcgagcagtggtttaccgaggaccctgggccagacgaggccccgcgcatgccggaagccgcacctccggtggcacctgcgcccgccgcacccaccccagccgcacccgcgccggccccttcgtggccattgtcctcttcggtcccatcgcaaaaaacttaccagggatcatacggattccgcctgggattcctgcactcagggacggccaagtccgtgacctgcacctactcgccggccctgaataagatgttctgccagttggctaagacttgtccagtgcaactctgggtggatagcacgcctccgcctggaactcgggtccgagctatggctatttacaaacaatcacagcatatgaccgaggtggtcagaaggtgcccacaccacgagaggtgctccgactccgatggccttgcgccccctcaacatctgatccgcgtggaaggaaacttgcgcgtggaatatctcgatgatcgtaacactttcagacattcagttgtggtgccatacgaaccgccagaagtgggtagtgactgcactaccattcactacaattacatgtgcaactccagctgtatgggcggaatgaacagacgcccgatcctgaccatcatcactctcgaggacagcagcggtaacctccttggccgcaatagctttgaggtccgcgtgtgcgcgtgtcccggaagagatcggcggacggaggaagaaaacctccggaaaaagggagagccgcaccacgaactcccgcctgggtcgaccaagcgggcgctcccgaacaacacctcctcctcaccgcaaccaaagaagaagccgctggacggtgaatactttactctgcagatcagaggccgcgaacgcttcgaaatgttccgggagctgaatgaagcgttggagctgaaagacgctcaggccggaaaggaacccggaggctcgagggcccacagctcccatctcaaatcaaagaagggacaatccacctcgcggcataagaagctgatgttcaagactgagggcccggatagcgac

SEQ ID NO: 20496 - DNA, 1179 bp, synthetic construct
  misc_feature 1..1179: note = source = /note="Description of Artificial Sequence: Synthetic coding sequence"
  source 1..1179: mol_type = other DNA
atggaagagccccagagcgatccttccgtggaaccgccactgtcccaggagactttttcagatctgtggaaactgctccctgagaacaatgtgttgtcgccgctgccgtcgcaggccatggacgacttgatgctttccccggacgatattgaacagtggttcaccgaggatccaggcccagacgaggcgccgcgaatgcccgaagcagcaccgcctgtggccccggcaccagccgccccaaccccagccgcccccgcgcccgctccgtcctggcctctgagcagcagcgtgccaagccaaaagacctaccagggttcatacggatttagactcggctttcttcacagcggaacggcaaaatccgtgacctgcacttactccccggcgctgaacaagatgttttgccagttggccaagacgtgcccggttcaactttgggtcgacagcacccctccaccaggaactagagtgcgcgcgatggcgatctacaagcagtcgcagcacatgaccgaagtggtgcgccggtgcccacatcatgaaagatgttcagactcagacggactcgccccaccgcaacatctgatcagagtggaaggaaatctgagggttgaatacctggatgatcggaacaccttccggcactcggtcgtggttccctacgaaccgccggaagtgggatccgactgcactaccatccattacaactacatgtgcaactccagctgcatgggcgggatgaacagacggcctatcctgaccatcataactcttgaagattcgtcaggcaatttgttgggccggaactcgttcgaggtccgggtgtgcgcttgtccgggacgcgaccggcggactgaggaagagaacctgagaaaaaagggcgagccgcaccatgagctgccgcccggatctaccaagcgagctctgccaaacaacaccagctcgtcaccacagcctaagaaaaaaccgcttgacggtgaatacttcaccctgcagatccgcggacgtgagcggttcgagatgttcagggaactgaacgaagcgctggagttgaaagacgcccaagccggcaaggagccgggaggtagcagggcccattcttcccatctcaagtccaaaaagggccaatcaacttcgcggcacaagaagctgatgttcaagaccgaaggcccggactccgac

SEQ ID NO: 20497 - DNA, 1179 bp, synthetic construct
  misc_feature 1..1179: note = source = /note="Description of Artificial Sequence: Synthetic coding sequence"
  source 1..1179: mol_type = other DNA
atggaggaaccacagagcgacccctccgtggagcctccgctgtcgcaagaaacgttcagcgatctgtggaagctcctgccggaaaataacgtgctgtccccgctgccttcccaggccatggatgatctcatgctgtcacccgacgacatcgaacagtggttcactgaagacccagggcccgacgaagcaccccgcatgccagaggcggccccaccggtggccccagcaccagcggccccaacgccggccgccccggcgcctgcgccgtcctggccgctgtcgtcgagcgtgccgtcccagaagacctaccaaggatcatacggatttagactgggattcttgcattcaggaaccgctaagtcggtcacgtgtacctactcgcctgcattgaacaagatgttctgccagctcgccaagacttgcccggtgcagctgtgggtggattcgactccgccaccgggaaccagagtgagggctatggccatctacaagcagtcgcagcacatgactgaggtggtgcgccgatgcccacatcacgaacgctgctcggattccgacggacttgccccaccgcaacacctgatccgcgttgaagggaatctgcgggtcgagtacctggatgacagaaatactttccgccactcagtggtggtgccgtacgaacctccggaagtgggatcggactgcacgactatccactacaattacatgtgtaactcgtcgtgtatgggcgggatgaatcggcgcccgatcctgactatcatcactctggaagacagcagcggaaacctcctcggacgcaattcattcgaagtccgcgtttgcgcgtgtcccggaagggaccgccggactgaggaggagaatttgcggaagaaaggagagccacaccacgagctgccgcctggctcaacgaaaagagcactgccgaacaacacctcgagctcaccacagccaaaaaagaagccgctcgatggtgaatacttcactcttcaaatccgtggccgcgagcgcttcgaaatgttccgggaactgaatgaggcgctggagctcaaggacgcgcaggccggcaaagaaccgggcggaagcagagcccactcttcgcatttgaaaagcaagaaaggccagtccacgtccaggcataagaaacttatgtttaagaccgaaggaccagactcagac

SEQ ID NO: 20498 - DNA, 1179 bp, synthetic construct
  misc_feature 1..1179: note = source = /note="Description of Artificial Sequence: Synthetic coding sequence"
  source 1..1179: mol_type = other DNA
atggaagagcctcagagtgatcccagtgttgagccccccttgtcccaggaaacgttctctgatctttggaagctgcttccggaaaacaacgttctgtccccccttccatcccaggccatggacgatcttatgctgagcccagacgacattgaacagtggttcaccgaggacccagggcctgacgaggctccccggatgcccgaagccgccccccccgtggcgccagccccagctgcgcccacacctgccgcgcctgcacccgcaccttcctggcctctgtcctctagcgtgccatcacagaagacctatcagggatcttatggctttcgactgggctttctgcatagcgggacagcgaaatctgtgacctgtacctatagccccgctttgaacaaaatgttctgccaactggccaagacatgcccagtacaactgtgggtggacagcactccaccacctggaaccagggtgcgggctatggctatctataagcaaagtcaacacatgaccgaagtcgtccgccgatgccctcaccacgaacgctgtagcgattctgacgggctcgcaccaccccaacatctgatcagagtggaagggaaccttagggtggaataccttgacgaccgaaatacgttccgccactctgtggtagtcccatatgagcctcccgaggtgggatctgactgtaccaccatccactataactatatgtgtaatagctcctgcatgggaggcatgaatagacgtcccattctcacaattataactctcgaagatagcagcggaaatctcctagggcggaactcattcgaggtgagggtgtgtgcctgccctggccgggaccgcaggactgaggaggaaaatctgcggaagaaaggggaaccacatcatgagttaccacccggtagcactaagcgagccttgcccaataatacttccagcagcccacagcctaagaaaaaacctttggacggcgaatacttcacgctgcaaatccggggtcgagagcggttcgagatgttcagggagctgaatgaagcgcttgaattgaaggacgctcaagcaggaaaagagcccggtggcagtcgcgctcattcctcgcacttgaagtcaaagaagggccagtcaacatcaagacataagaagctcatgtttaaaaccgaagggcccgatagcgac

SEQ ID NO: 20499 - DNA, 1179 bp, synthetic construct
  misc_feature 1..1179: note = source = /note="Description of Artificial Sequence: Synthetic coding sequence"
  source 1..1179: mol_type = other DNA
atggaagagcctcagtcagacccctcagtggagcctcctctttcacaggagactttttcagacctttggaaattgctccccgagaacaacgtgctgtcgcctcttccttcccaagccatggatgatcttatgctttccccagatgatattgaacagtggtttaccgaggacccaggtccggatgaggccccccgaatgcctgaggctgctcctccggtggctccagcacctgcggctcccacgccggcagcaccggccccggcaccatcgtggcctctctcatcaagcgtgccatcacagaaaacttaccaaggtagctatggctttcggctcgggttcctgcactctggaaccgcaaaatccgtcacctgcacgtattcgccagcgcttaacaagatgttttgtcagctcgcaaaaacctgtccagtgcaactgtgggtcgacagcactccccctccaggtactagagtccgggcaatggcaatttacaaacaatcgcaacacatgaccgaagtggtgcggaggtgtccccatcatgagagatgctcggactccgatgggcttgccccgccccaacatctcataagggtggagggaaaccttcgggtcgaatacctcgatgatcgtaacaccttcaggcactctgtggtggttccctatgaaccgcctgaggtcgggtcagattgtactactattcattacaactacatgtgtaattccagctgtatggggggaatgaacaggcgccccatcttgaccattatcactctcgaagattcaagcgggaatttgctcggaagaaactcgttcgaagtccgcgtgtgtgcatgtcccggtcgcgatcgcaggaccgaagaagaaaacctcagaaagaagggggagccacatcatgaattgccccctggttccaccaagcgagcgctgcctaacaacacttccagcagcccacaacctaagaagaagcctctcgacggcgagtactttacgcttcagatccgcggcagggagagattcgaaatgtttagagagctgaatgaagcccttgaactgaaggacgcacaagcaggtaaggaacctgggggaagccgagcgcatagcagccatctgaagtccaagaagggacaatccacgtccagacacaaaaaacttatgtttaagaccgaaggtccagatagcgac

SEQ ID NO: 20500 - DNA, 1179 bp, synthetic construct
  misc_feature 1..1179: note = source = /note="Description of Artificial Sequence: Synthetic coding sequence"
  source 1..1179: mol_type = other DNA
atggaggaaccacagagtgatccctctgtagagccaccattgagccaggaaaccttttcagacctctggaagctgctccccgagaacaatgtgctgtcgcctctgccctcgcaggcaatggacgacctgatgttgtctcctgatgacatagaacagtggtttacagaggaccctggccctgacgaagccccccggatgcctgaggctgcgcccccagttgcccccgctcctgctgccccaacgccagccgctcccgcgcctgctcccagctggcccctctccagctctgtgccctcccaaaagacttaccaaggtagttatggattcaggctcggctttttgcacagtggaacggctaaatcggtgacgtgcacttacagccccgctctaaataaaatgttttgccagctggctaagacatgtccagtgcagctgtgggttgatagcacacccccacctggcacacgcgtaagggccatggcaatttataaacaatcacagcacatgacagaagtggttaggaggtgtccccatcacgagcgttgttccgattcagacggtttggctccacctcaacatctgatccgagtggagggcaatctaagagtggaatacctggatgatcgcaatacatttcggcattccgtcgtggtgccctatgaaccgcccgaggtggggtccgattgtaccacgatacattacaactacatgtgcaattcgtcctgcatgggtggtatgaataggcgacccatcctgaccataatcactctggaagactcctcaggaaatctgctcggtcgaaactcatttgaagtccgcgtgtgcgcttgtccggggcgcgatcgccggaccgaagaagagaatctgaggaaaaagggggaaccccatcatgaacttccaccgggcagtaccaaacgggcactacccaacaataccagttcttcaccacagccgaagaagaagccactcgacggggaatacttcaccctccaaattagaggacgagaacggtttgagatgttccgggaactgaacgaagctctggaactgaaggacgcacaggctggcaaagaacccggggggagtcgcgcccactctagccatctgaaaagcaagaaggggcagagcacatcacgccacaagaagttaatgtttaagacagaagggcctgacagtgac

SEQ ID NO: 20501 - DNA, 1179 bp, synthetic construct
  misc_feature 1..1179: note = source = /note="Description of Artificial Sequence: Synthetic coding sequence"
  source 1..1179: mol_type = other DNA
atggaagaacctcagtcagatccctctgtcgagccccccctaagtcaggagacctttagcgatctgtggaagctcctacctgaaaacaatgtcctatctccactgcctagtcaggccatggatgatctcatgttgtctccagatgacattgagcagtggttcacggaggatcccggacctgatgaagccccacgaatgccagaagctgcccctcccgtggccccagcccccgccgcacctaccccagctgcacccgccccggctcccagctggccactgtcctcttcggtgccttctcaaaagacctaccaagggtcatatggcttccgactgggctttctccatagcggaaccgccaagtccgtgacttgtacctattctccggcactcaacaagatgttttgccaactagctaagacctgccccgtgcagctctgggtggacagtacccctccacccggaacacgagtgcgggcaatggcaatatacaaacaaagtcagcacatgaccgaagttgtacggcgttgcccgcatcatgagaggtgcagcgattctgacggacttgcccctccgcagcatcttatccgagtggagggcaatctacgagttgagtatctggacgacagaaacacctttaggcactcagtggtggttccatatgagccgccggaagtgggttccgactgcactaccatccactacaattacatgtgtaacagctcctgcatgggaggaatgaatcgacgaccaattctgactatcatcaccctcgaagattctagcggaaatctcctcggccgaaattcctttgaagtgagggtgtgtgcctgccctgggcgagataggcgcaccgaagaggaaaatctgaggaagaaaggtgaaccccaccatgaactgccccccggttccactaagagagcgctccctaataatacgtccagctcaccacagccaaaaaaaaagccactggatggggaatatttcaccctgcaaataagaggacgggagcgttttgagatgttccgcgaacttaacgaggcactcgaactcaaggatgcacaggccggcaaggaacctgggggatctagagcacacagcagccaccttaagtcgaaaaaaggacaatcaacatcccggcacaaaaagctcatgttcaaaacggaaggcccggattccgac

SEQ ID NO: 20502 - DNA, 1179 bp, synthetic construct
  misc_feature 1..1179: note = source = /note="Description of Artificial Sequence: Synthetic coding sequence"
  source 1..1179: mol_type = other DNA
atggaggagcctcaatcagatccgtcggtcgagcctcctctgagccaagaaaccttcagcgacctttggaaactcctccctgagaataacgtgctttccccccttccgtcgcaggcaatggacgatctgatgctctcccctgatgatatcgaacagtggtttactgaggacccaggccctgatgaggcccctagaatgccagaagccgcacctccagtggcacccgcacctgcagcgcctacccccgcagcaccagctccagcaccgtcgtggcctctttcatccagcgtgccatcgcaaaaaacttaccaaggctcatacggcttcagactcggattcttgcattcgggaactgcaaaatcggtgacttgtacttactcccctgcgcttaacaagatgttttgtcaacttgcaaaaacctgtccagtgcagctgtgggtcgattccactccgccgcccggaacccgggtgagggcaatggcgatttacaagcaatcgcaacatatgaccgaggtggtgagacgctgcccccatcacgaacggtgtagcgattcggatggtctggcaccaccccaacatctcatcagagtggaagggaatctgcgtgtcgaatatcttgacgatagaaatacctttcggcatagcgtggtggtgccatatgagccacctgaagtgggcagcgattgcacgaccatccattacaactacatgtgcaattccagctgcatgggaggcatgaatcgtaggcctatccttactattatcacccttgaagattcatccggaaaccttctgggtagaaacagcttcgaagtgagagtgtgcgcctgcccaggaagagatcgccgcactgaggaagagaaccttcgcaaaaaaggagaacctcatcacgaactgccacctgggagcaccaagcgggcccttccaaacaacacttcgtctagccctcaacctaagaaaaagccactggatggtgagtactttaccctgcagattcgaggtcgggagcggtttgagatgtttcgggagctcaacgaggctctcgaattgaaggacgcacaagcaggcaaagaacccggtgggtcgcgggcacactcatcgcatcttaagtcgaagaaaggccaatcaacttccagacacaaaaagctcatgtttaagactgaaggacctgactccgat

SEQ ID NO: 20503 - DNA, 1179 bp, synthetic construct
  misc_feature 1..1179: note = source = /note="Description of Artificial Sequence: Synthetic coding sequence"
  source 1..1179: mol_type = other DNA
atggaagagccacagtcggaccctagcgtggagccacctctcagccaagagaccttttccgacttgtggaaactgttgcctgaaaacaatgtgctaagtccccttccgtctcaggccatggacgacctcatgctgtctccagacgacatcgagcaatggtttacagaggacccagggcccgacgaggcgcccaggatgccggaggctgcccccccagtggcccctgcccccgccgcccccacaccagctgctccggctccggccccttcctggcccctctcaagctccgtaccctcacagaagacttatcagggaagctacgggttccgccttggcttcttgcatagcgggaccgccaaatcagtaacttgcacatatagccccgctttgaacaagatgttctgccaattagccaagacctgtccagtgcagctgtgggtggacagcacgccacctcctgggaccagggtgagggcaatggccatttacaaacaatctcagcatatgacggaggtggttcggaggtgcccacatcacgagaggtgtagcgacagcgatggcttggctccgccacagcatctaatcagggtcgagggtaaccttcgcgttgaatacctcgacgaccgcaatacattccggcactccgttgtggtgccttatgaacctcctgaggtgggatctgattgcacaaccatccactacaattacatgtgtaactcaagctgcatgggcgggatgaatagaagaccaatacttacaataatcactctggaggactcctcggggaacctcttggggaggaatagcttcgaggtcagggtttgtgcctgtccgggcagagaccgcagaacagaggaagagaatctgcgtaaaaaaggcgagccccatcacgaattaccacctggctccacgaaaagggccctccctaataacacctcatcttccccacagcccaagaaaaaaccgctggacggggagtattttaccctgcagatcagaggaagagaacggttcgagatgtttcgggaacttaacgaggcacttgaactcaaggatgctcaggcagggaaagagcctgggggatccagggcccactccagtcaccttaaatctaaaaaaggccagtctacctctaggcacaagaaactgatgtttaaaactgaaggaccagacagcgat

SEQ ID NO: 20504 - DNA, 1179 bp, synthetic construct
  misc_feature 1..1179: note = source = /note="Description of Artificial Sequence: Synthetic coding sequence"
  source 1..1179: mol_type = other DNA
atggaggaaccacagtccgatccatccgtggaacccccgttgtcccaggaaacttttagcgacctgtggaagctgctgcctgagaataacgtgttgtctcctctgccaagtcaagctatggatgacctgatgctttcccccgacgatattgagcaatggtttaccgaagaccctggacccgacgaggccccccggatgcccgaagccgccccgcccgtagcccctgcccctgcagcccccactccggccgctccagctcccgcacccagctggccactgtccagttccgtcccgtctcagaagacctaccaggggtcttatggctttcggctgggattcctgcattctggcactgcgaaaagtgtgacctgcacttactctcccgcccttaataagatgttttgtcagctggcaaaaacgtgtcccgtgcagctctgggtagactccaccccccccccgggtacccgggttcgagcaatggcaatttataagcagtcacagcatatgaccgaggtagttcgtaggtgtccacaccacgaaaggtgctctgactctgatgggttggcgcccccgcagcacttgataagggttgagggaaatctgcgggtggagtatctcgacgataggaatacattccggcattctgtggtggttccctatgagcctccggaagttgggtcggactgtaccacaatccattacaactatatgtgcaactcctcctgcatgggaggtatgaatcggaggcctatcctcaccattattaccctcgaagacagctcaggtaatttgctggggaggaacagttttgaggtgcgtgtttgtgcctgcccagggcgcgacagacggacagaggaggaaaacctgcgaaaaaagggtgagccgcaccacgaactgcccccagggtcaaccaagcgagcgctgccaaataacacctctagctctccccagccgaagaagaaaccgctcgacggggagtatttcacattgcagatccggggcagagagcgatttgagatgtttcgggagctgaatgaggccctggaactgaaagatgcccaagccggcaaagaacctgggggcagtcgtgcgcatagttcccacttgaaaagcaaaaagggacagagcacttcaaggcacaagaaactaatgtttaagaccgagggtcccgacagcgat

SEQ ID NO: 20505 - DNA, 1179 bp, synthetic construct
  misc_feature 1..1179: note = source = /note="Description of Artificial Sequence: Synthetic coding sequence"
  source 1..1179: mol_type = other DNA
atggaggagcctcagtccgatccaagcgttgaaccccctctgtcccaggaaacattttccgacctgtggaagctcttgcctgagaacaatgtactctcacctctgccctctcaggctatggacgacctgatgttgtcaccagatgatatcgagcagtggttcacagaagacccagggccggatgaggcacctagaatgccagaggccgccccgccagtagctcctgcaccagccgcccccacaccggcagcacctgcccccgccccatcctggcccctgagcagtagcgtgccctctcagaagacttaccaggggagctacgggtttaggctgggatttctgcattccggcaccgccaagagcgttacttgtacatacagccctgccctcaataagatgttctgtcaactggcaaagacctgcccggtgcaactttgggtggacagtacaccaccccccggaactcgagtgagggctatggctatctacaaacaatcacagcacatgaccgaggtcgttaggcggtgcccgcatcacgaaaggtgcagcgatagcgatggcctggcacctccacagcatctcatcagggtagaaggcaacctgcgagtcgagtatctcgacgaccggaataccttccgccattccgtggtggtgccctacgagcctcccgaggtgggcagtgattgtaccacaatccactataattacatgtgcaattcatcttgtatgggcggcatgaatagacggccgatcctgactatcatcacactcgaggacagctccgggaatttgcttgggaggaactcattcgaagtgcgcgtatgtgcttgccctgggagggacaggcgaaccgaagaggaaaaccttaggaagaagggggaaccccatcacgaacttccaccaggtagcactaaaagggccctccctaacaacacctccagtagtccgcagccgaagaagaagccactcgacggcgagtattttactctgcagatccgcggacgcgaaaggtttgagatgtttagagagctgaatgaagccctggagttgaaggacgcccaggctggaaaggaaccggggggcagcagggcccactcatcacacttgaagtcaaaaaagggtcagagcactagccggcacaagaaactgatgttcaagacggaaggtccagattcagac

SEQ ID NO: 20506 - DNA, 1179 bp, synthetic construct
  misc_feature 1..1179: note = source = /note="Description of Artificial Sequence: Synthetic coding sequence"
  source 1..1179: mol_type = other DNA
atggaagagccccaaagtgatccatccgtggagcctcccctctctcaggaaacattttcagacctgtggaagttactaccagagaataatgtgctttcgcctcttccatcacaggctatggacgacctaatgttgagcccagacgatatcgaacaatggttcaccgaagatccaggccctgacgaggcaccgagaatgcccgaagccgcccccccagtggcccctgcgcccgccgctccaacacctgcggctcctgcccccgccccgagctggcccctgtctagttcggtgccgtcccagaaaacctaccaggggtcctacgggttccgcttggggttcctacattctggcactgcaaagtcagtgacatgtacctacagtcccgctcttaacaagatgttttgccagcttgcaaaaacctgtcccgtgcaattgtgggttgattctactcccccccctggcacacgcgtgcgtgcgatggcaatatacaagcaaagtcagcacatgacggaggttgttaggagatgtccgcaccacgaacggtgtagcgactctgatggactggccccgccacagcatctgatcagggtcgaggggaacctgcgtgttgagtatctcgacgaccggaatactttccgtcactctgtggtcgtaccatatgagccaccagaggtaggctccgattgtaccacgatccattacaactacatgtgtaatagctcttgtatgggtggaatgaataggagaccaattctgactatcatcacgctggaggattcgtcggggaatctcttaggacgaaactcttttgaagtccgtgtgtgtgcgtgccctggtcgcgatagacgtaccgaagaggagaatttgcgtaaaaaaggtgagccccatcacgagctcccccccggatccaccaaacgggcccttcccaacaatactagtagttctcctcagcccaaaaaaaaaccacttgacggggagtattttacgctgcagattagaggtcgggagcgtttcgagatgttccgggagctcaatgaagccctcgagctcaaggacgcccaggccggcaaggagcctgggggaagtagggctcatagttcccacctgaagtccaaaaaaggtcagtctacctcccgtcataaaaagctgatgtttaagacagaaggaccagattcggac

SEQ ID NO: 20507 - DNA, 1179 bp, synthetic construct
  misc_feature 1..1179: note = source = /note="Description of Artificial Sequence: Synthetic coding sequence"
  source 1..1179: mol_type = other DNA
atggaggagccacagtctgaccccagcgtcgagcccccattgtcccaggaaacgttttctgatctctggaagttgctccccgaaaacaacgtgctgagtcccctcccctcacaggctatggacgacctgatgctttccccagatgatattgagcaatggttcaccgaggatcctggtcccgacgaggccccgaggatgccggaagctgcaccaccagtcgctcctgcaccagccgccccgacgccggcagctcctgctccagcgcccagctggcctctgtcctcatcagttccctctcagaaaacttatcaaggatcatacggcttcagactgggattcttgcattcaggaactgctaagtccgtgacctgcacatactcacccgctttgaataagatgttttgccagttggccaagacatgccctgttcagctctgggtggatagtacccctccccccggtacccgcgttagggccatggccatctacaagcagtcccagcacatgactgaggtagttagacgctgccctcaccacgagaggtgcagtgatagtgacggactcgcccccccacagcacctgatcagagttgaaggaaatttgagggtcgagtacttggacgacagaaatacattcagacactccgtagtcgttccttacgagcccccggaggtcggatctgactgtactacaattcactacaattatatgtgcaactcttcttgcatgggcggaatgaatagacgcccaatccttactatcattacgctggaggactcttcaggaaacctcctcggcagaaactctttcgaggtcagggtctgcgcctgccccggtcgcgaccgcagaactgaggaggagaacctgaggaaaaagggtgagcctcaccacgagctgcctccgggttcaacgaagagggctttgccgaacaacacctcttccagcccgcaacccaaaaagaagcccctggacggtgaatacttcaccctgcaaattaggggtagggagaggttcgagatgttcagggaattgaatgaagccttggaactgaaagacgctcaggcaggcaaggaaccaggaggttccagggcacattcttcacaccttaaatctaagaagggccagagcacaagccgccataagaagctgatgtttaagacggagggtccggacagtgac

SEQ ID NO: 20508 - DNA, 1179 bp, synthetic construct
  misc_feature 1..1179: note = source = /note="Description of Artificial Sequence: Synthetic coding sequence"
  source 1..1179: mol_type = other DNA
atggaagaacctcaatcggacccatcagtcgaaccacccctgagccaggaaacctttagcgatctctggaagttgctgcctgagaataatgtgctgtcgcctctgccaagccaggcaatggacgaccttatgctgagtcctgatgacatcgaacaatggttcactgaggacccaggacctgacgaggccccacgaatgcccgaagcagcaccgccggtggcccctgctccggcagcccccactcccgcggcccccgccccagctccctcctggcctctttcctcaagtgtgccatcgcaaaagacttaccagggctcatatggttttcggcttggattcctccactccggaacggcaaaatccgtgacgtgtacttactcaccggcactgaacaagatgttctgtcaactggcaaaaacttgtcccgtgcagctctgggtcgattcgactcctccgcccggcacccgggtcagagcaatggcaatctacaaacagtcccaacacatgactgaagtcgttagacggtgtccccatcacgaaagatgctcggatagcgatggtttggcacctccacaacacctcatcagagtggaggggaaccttcgtgtggaatacctcgatgatcggaacacctttcggcattccgtggtggtcccttacgaaccacccgaggtgggatctgactgtactactatacattacaattacatgtgcaacagctcctgtatgggaggcatgaacaggaggccaattctcaccatcattacgctcgaagatagctccggaaaccttctcggaagaaacagctttgaagtgcgtgtgtgcgcatgcccaggacgggacagaagaaccgaggaagagaatcttcgaaagaaaggcgagccacatcacgaacttccacctgggtcgaccaagcgagcccttcctaacaacacttcctcgtcccctcagccaaagaagaagccgttggatggagagtactttacgctgcaaataagaggcagagaacgatttgaaatgtttcgagaactcaacgaagcactggagctgaaagatgcacaggcgggcaaggagcccggaggatcgcgtgcacatagctcccacttgaaaagcaagaagggacaatcgacctcccggcacaagaagttgatgtttaagaccgaaggacctgattctgat

SEQ ID NO: 20509 - DNA, 1179 bp, synthetic construct
  misc_feature 1..1179: note = source = /note="Description of Artificial Sequence: Synthetic coding sequence"
  source 1..1179: mol_type = other DNA
atggaagagcctcagtctgatccatcggtggaacctccacttagccaggaaacgttctcggatctttggaaactccttcccgagaataatgtgctgtcgccccttccttcccaagcaatggacgatctcatgctctcacctgacgatattgaacaatggtttactgaggacccaggaccagacgaggcacctcgaatgcccgaggcggcacctcccgttgcaccagcgcctgctgcgcctactccagcagcacctgcacctgcaccctcgtggcctctctcatccagcgtccctagccagaaaacttatcagggctcctacgggtttcgactcgggtttttgcattcaggaactgcaaaatccgtgacttgcacctactcgcccgcacttaacaaaatgttttgtcagctcgccaaaacctgtcctgtgcaactgtgggtggattcgactccccctcctggcactcgtgtcagagcaatggctatatacaagcagtcgcaacatatgactgaagtcgtgaggcgctgtccacaccacgaacgttgttcagattctgatggacttgccccaccacaacatctgatcagagtggaaggcaaccttagagtggagtacctggacgataggaacacctttaggcacagcgttgtggtgccatacgaaccaccggaggtcggctcggattgtactactatccattacaattacatgtgcaactcatcctgtatgggtggtatgaatagacggccgatcctgaccattatcactcttgaagattcgagcggaaacctgctgggccgaaactcgtttgaagtcagggtctgtgcgtgtcctggtcgagatagaagaacggaagaggagaaccttcggaagaaaggagaaccccatcatgagctgccacctggatccaccaagcgcgccctgcccaataacacctcttcgagcccgcaaccgaaaaagaagccgctggacggcgagtactttaccttgcaaatccgaggtcgggaaaggtttgagatgtttagggaactcaacgaagcactggaactgaaagacgcacaagcaggaaaggaacccggtggttccagagctcactcatcacatctgaagtcgaagaaaggacagtcaacctccagacacaagaaacttatgttcaagaccgaaggcccagattccgat

SEQ ID NO: 20510 - DNA, 1179 bp, synthetic construct
  misc_feature 1..1179: note = source = /note="Description of Artificial Sequence: Synthetic coding sequence"
  source 1..1179: mol_type = other DNA
atggaagaacctcaatcggatccgagcgtggaacctcctttgagccaagaaaccttttccgatctgtggaagctcctcccagaaaacaacgtgctctcacccttgccatcgcaggccatggatgatctgatgttgtcgccagacgacatcgaacaatggtttacggaggatcccggcccagatgaagcccctcgtatgcctgaggccgcgccgcctgtggcccccgcaccagcagcccccactcctgcagccccggccccagcaccaagctggccactttcctcctccgtgccaagccagaaaacttaccagggttcgtatggttttcgacttgggtttctccactcgggcaccgcaaagtcggtgacttgtacttactccccggcactcaacaaaatgttttgtcaattggcaaagacttgtccagtccagctctgggtggatagcaccccaccgccaggtacgagagtgcgcgcgatggctatttacaagcagtcacaacacatgacggaggtcgtgcgaagatgcccacaccacgaacgatgttcagactccgacgggctggcaccaccacagcatcttattagagtcgaaggaaatctgagggtggaatatctggatgaccgaaacacctttcgtcattcagtggtggtcccttacgaacctcccgaggtgggctcagattgtactaccatacattacaactatatgtgcaactcgtcctgtatgggtggtatgaaccggcgacccattctgaccatcataacccttgaggactcaagcggaaaccttcttggtcggaactcctttgaagtgagagtgtgcgcatgcccaggaagggatagaaggaccgaagaagaaaatctccgcaagaagggcgagccccatcatgagcttccgcctgggtctactaagagggcactgccaaacaatacctcgagctccccacagccgaagaagaagcctctggatggagagtacttcactctgcagattagaggtcgcgagagatttgaaatgtttcgagaactgaatgaagcactggagcttaaagacgcacaagccggaaaagaacctggagggagcagagcccatagctcacatcttaagtccaagaaaggacaatcgactagccgtcataagaagctgatgttcaaaactgaaggcccggatagcgat

SEQ ID NO: 20511 - DNA, 1179 bp, synthetic construct
  misc_feature 1..1179: note = source = /note="Description of Artificial Sequence: Synthetic coding sequence"
  source 1..1179: mol_type = other DNA
atggaagagccccaatctgacccgagcgtggaaccccctctatctcaggagacttttagtgatctgtggaagttgctgcccgagaacaatgtgctctccccgctccccagtcaggcaatggacgacttaatgttgagtcctgacgatattgagcagtggtttaccgaggaccccggtccggatgaagccccaagaatgcctgaggctgcgccccccgtggcccctgctccagccgcacctacgcccgccgccccagcaccggctccatcctggccactcagctctagtgtgcccagccagaagacctatcagggcagctatggattccggctcggctttcttcattcaggtacagccaagtcagtgacttgtacctattctccagcactgaataagatgttctgccagctagccaagacgtgccctgttcagttgtgggtggatagtactccccctcctggcactagagtgcgggctatggccatctacaagcagtcacagcacatgaccgaagtggtgcgaaggtgtccccaccatgagagatgttccgactcggacggcctcgctccgcctcagcatcttattagagtcgagggcaacctgcgcgtggagtatctggacgataggaatacttttcgccattcagtggtggtgccgtacgaaccgcccgaggtgggttctgattgtactaccattcactataattacatgtgcaatagcagttgtatgggaggtatgaatcgacgtccaattctgacaattatcacattggaagactcttctgggaatcttcttggaaggaactcttttgaggtcagagtctgtgcatgtccgggacgcgacaggaggaccgaggaggagaacctgcggaagaagggtgagccacaccacgagttgcctcccgggtccactaagagagctctccccaataacacgagttctagtcctcagcccaagaaaaagccactggacggagagtatttcaccctgcagatccgcgggcgtgaaaggttcgaaatgttccgcgaactaaatgaggccctagagcttaaagatgcccaggctggcaaagagcctggcggaagcagagcccattcctcacacttgaaatctaaaaaaggacagtcaacctcgagacacaaaaagctcatgttcaaaactgaagggcctgatagcgat

SEQ ID NO: 20512 - DNA, 1179 bp, synthetic construct
  misc_feature 1..1179: note = source = /note="Description of Artificial Sequence: Synthetic coding sequence"
  source 1..1179: mol_type = other DNA
atggaagaaccacagtctgatccctcagtggaaccccccctgagtcaggagacattttctgatctatggaaactcctaccagagaataatgtgctatccccacttccttcccaggccatggatgatctaatgctttcacctgatgacattgaacagtggtttactgaagaccctgggcccgatgaagcccctcggatgcctgaagcagcaccaccagtggccccagctcctgctgctccaacacctgcggccccagccccggctcctagttggcctctatcctcgtccgtcccctctcagaaaacttatcaggggtcctacggatttaggctcggattcctccattctgggacagccaaatccgtcacatgcacatattctccagccctaaataaaatgttctgtcagctggccaaaacatgtcccgtgcagctctgggtcgatagtacaccccctcctggaactcgcgtgagagctatggctatatacaagcagagtcagcatatgactgaagttgtccgtagatgtcctcaccacgagcgatgctcggatagtgatggactcgcccccccccagcatcttattcgcgttgagggaaacctgagagtagagtatctagatgatagaaacacattccggcacagtgtggtagtgccgtatgaaccacctgaagtcgggagtgattgcactactattcattataattatatgtgtaactcaagttgcatgggggggatgaatcgccggccaattctcacaatcataactttagaggatagttcaggaaatctgctcggaagaaatagttttgaggtacgggtctgtgcgtgccctggacgagatagacggactgaggaagaaaaccttagaaaaaagggagaacctcatcacgaactgcccccaggatcaacaaaaagggctctcccaaataatacgtcatcctcaccacagcccaaaaagaaacctctcgatggagaatattttacgttgcagattagaggaagagaaaggtttgaaatgttccgcgagctcaatgaagcactggaacttaaagatgcccaggcggggaaggagccaggagggtcacgcgcacactcatcacatctaaaatctaaaaaaggacagtctacatctcggcataaaaaactcatgttcaaaactgaggggcccgattcagat

SEQ ID NO: 20513 - DNA, 1179 bp, synthetic construct
  misc_feature 1..1179: note = source = /note="Description of Artificial Sequence: Synthetic coding sequence"
  source 1..1179: mol_type = other DNA
atggaggaaccacagagcgacccttctgtggagcctcccctgagccaagaaacctttagcgacctgtggaagcttctgccagaaaataacgtgttgtcgcctctgccttcacaggcaatggacgatctgatgctaagcccagacgacatcgagcagtggttcaccgaggaccctggccccgacgaagccccccgcatgcctgaagctgcaccccccgtggcccctgcccccgccgcaccgacccctgcggccccagcaccagctccttcttggccactctcatccagtgtaccaagccaaaagacctaccagggctcctatggattccggttggggttcctgcacagcggcaccgccaaatctgtgacttgtacatacagccctgcattgaacaagatgttctgtcagcttgctaaaacatgccccgtgcagttgtgggtggacagtacgcctccccctggaaccagagtccgagccatggcgatttacaaacaaagtcagcacatgacggaggtcgtgaggaggtgtccccaccatgagcgttgttcggatagtgacggccttgcccccccccaacatctgatcagggtggaagggaatctaagggtcgagtatctcgacgaccgaaacacttttaggcattcagtagtagtgccttatgagccccctgaagtgggcagtgattgtacaaccatccactataattacatgtgtaattcgagctgcatgggtgggatgaataggcggccgattcttactattatcacacttgaggattcttctggaaatctgctggggcggaattcgtttgaggtgcgagtctgcgcgtgccccggccgagaccgcaggactgaggaggaaaatctgcgtaagaagggcgagccccatcatgaacttcctcccgggtctaccaagagagccttgccgaacaacacaagctcctccccccaaccaaaaaaaaagcccctggatggcgagtacttcactttgcagatccggggtagagagcgatttgaaatgttcagggaacttaacgaggctctcgagctcaaggacgcccaggcaggaaaagagcccggtgggtccagggcgcacagtagccatctgaaatctaagaagggtcagagcacaagtcgtcataaaaagttgatgtttaagactgagggtcccgactcagat

SEQ ID NO: 20514 - DNA, 1179 bp, synthetic construct
  misc_feature 1..1179: note = source = /note="Description of Artificial Sequence: Synthetic coding sequence"
  source 1..1179: mol_type = other DNA
atggaagaaccgcagagcgacccgtcggtcgagccaccgctctcccaagaaaccttctcggacctttggaagctcctcccggagaataatgttttgtctccgttgccgtcccaggctatggacgatctcatgctgtcccccgatgacatcgaacaatggttcactgaagatccaggaccagatgaagctcctagaatgccggaggccgcgccgcccgtggccccggctcccgccgctcccactcctgccgctcctgccccagcaccatcgtggccactctcgtcatcagtcccgtcgcaaaagacctaccagggatcctacggattccgccttggcttcctgcattcaggaaccgcaaaatctgtgacgtgcacctattccccagcactgaacaaaatgttttgtcagttggcaaagacctgcccggtgcagctgtgggtggactcgactccgcctccgggaacccgggttagagcaatggccatctacaaacaaagccagcatatgactgaggtggtccggcgctgtccacatcacgaacgttgcagcgactcagacggcctggcgcctccccagcacctgatcagagtggaaggaaatctgcgggtggagtacctggacgatcgcaataccttcagacattcggtggtcgtgccgtacgaaccaccagaagtgggaagcgattgcacgaccatccactacaattacatgtgtaacagctcatgcatggggggtatgaataggcggccgattcttactattatcactctggaagattcaagcggaaatttgctcggaaggaactcctttgaggtcagggtgtgcgcttgcccgggccgggaccgtcgaacggaagaggagaatctccgcaaaaagggggagccccaccatgagctgccccccggaagcactaagagggccctgcctaacaatacgtcgtcgagcccgcagccgaagaagaagcctctggacggcgaatacttcactctccaaataaggggacgagaaagattcgaaatgtttcgcgagcttaacgaggctctcgaactcaaagacgcccaagccggtaaggaaccggggggttcgagagcgcactcctcacaccttaaatcaaagaaggggcaatcaacctcccgccacaagaagctgatgttcaagaccgaaggaccagattcggac

SEQ ID NO: 20515 - DNA, 1179 bp, synthetic construct
  misc_feature 1..1179: note = source = /note="Description of Artificial Sequence: Synthetic coding sequence"
  source 1..1179: mol_type = other DNA
atggaggagccacaaagcgacccctctgtggagccccccctttctcaagagaccttctcagacctttggaaactcttgccggagaataacgtgctgagcccattgccctcccaggccatggatgaccttatgctgtcccccgatgacattgagcagtggttcactgaggaccccggcccggacgaggcaccacgcatgcccgaggctgccccgcccgtcgccccggcacctgctgcaccaacgccggccgcccccgcacctgctccctcatggcccctcagtagtagcgtaccgtcccagaagacttaccaaggcagctatggttttagactcggctttctccacagtggaacggccaaatccgtcacatgcacatattcacccgcacttaacaagatgttctgccagctggctaagacttgtccggttcagctgtgggtggattccactccaccccctggaacacgggtgagagccatggccatatataaacagtcacagcatatgactgaggtagtcagaaggtgccctcaccacgaaagatgcagcgactccgatggtttggccccgccccaacatctcattagggtggagggcaacctgcgcgtcgaataccttgacgaccgaaacacgtttcgccacagtgtagttgtcccttatgagccccccgaggtgggatccgactgtaccaccatacactataactatatgtgcaatagttcatgcatgggcggtatgaacagacggcctatcctgaccatcatcaccctggaagattcaagcgggaatctgcttggacgcaatagctttgaggtccgggtgtgtgcctgtcctggaagggacaggagaaccgaagaagaaaatctgcggaaaaagggcgaaccacatcacgaactcccgccggggagtacgaaaagagcactcccgaataacacatcttccagcccccaaccgaaaaagaaacccctcgatggcgaatatttcacactgcagatcagagggcgcgagaggttcgaaatgttccgggaacttaatgaagccctcgagctgaaagatgcccaggccggaaaggagcctggagggtccagagcccatagctcacacctcaagtcaaaaaaaggacagagtacgagcagacacaaaaaattgatgtttaagactgaaggacctgactctgat

SEQ ID NO: 20516 - DNA, 1179 bp, synthetic construct
  misc_feature 1..1179: note = source = /note="Description of Artificial Sequence: Synthetic coding sequence"
  source 1..1179: mol_type = other DNA
atggaagaaccccagagtgacccgtcagtcgagccaccgttatcacaagagactttttccgacctatggaagctgttgccagagaacaacgtgctgtcaccactcccaagccaagcaatggacgacctgatgctgagtcctgacgacattgagcagtggtttacagaggatccaggaccggacgaagcgccacgtatgcccgaggccgctccccccgttgcccccgcccccgctgcacctacacctgcggccccagcacccgccccctcttggcctctgtctagcagcgtgccatctcaaaaaacctaccaggggtcatacggtttcagactggggtttctgcactccggtacagctaaatcggtgacctgcacatactccccggccctgaataagatgttctgtcagctggctaagacatgtcccgttcagctatgggtagactcgactcctcctcctggcacccgcgtgagggcaatggccatctacaagcagtcacagcatatgaccgaggttgttcggaggtgtccgcaccatgaaaggtgctccgattccgacgggctcgcgcctccccaacacctaatacgcgtagaaggcaatctgcgggtagagtacctggatgatcggaacactttccggcactccgtggtagtgccttacgagcctcccgaggtgggcagtgactgtactactattcactataactacatgtgcaatagcagctgcatggggggaatgaacaggaggcccattcttaccattatcaccctggaggatagctctggtaacctgctcggacggaatagcttcgaggtgagggtgtgtgcttgccccggtcgtgatagacgcaccgaggaagagaatttgcgcaagaagggggagccgcatcatgaactaccacccgggtccaccaaaagggctctgcccaataatacttcaagttccccccaaccgaagaagaaaccattggacggcgagtattttaccctccaaatcagaggtagagagcgattcgaaatgttcagagagctgaatgaggccctggaactcaaagatgctcaagcagggaaggagcccggaggatcacgggcccactcttcccacttaaaaagcaaaaaggggcaatctacgtcacgccataagaaactcatgttcaagacggaggggcctgatagtgac

SEQ ID NO: 20517 - DNA, 1179 bp, synthetic construct
  misc_feature 1..1179: note = source = /note="Description of Artificial Sequence: Synthetic coding sequence"
  source 1..1179: mol_type = other DNA
atggaggaaccccaatccgatccatcagtagagcccccgctgagccaagaaactttttccgatctttggaagctactccctgaaaataacgtcctttccccccttccaagccaagctatggacgacttgatgttgtcccctgacgacatcgagcaatggtttacagaagatcccggcccagacgaagctcccaggatgccagaagcagcccctccggtggcgccggcaccggccgctccaactcctgcggcccccgctccagcgccctcttggccgttgtcgtcctcagtcccgagccagaagacgtaccagggctcgtatggatttcgtcttggattcctacattctggaaccgccaaatccgtaacctgtacctattcgcctgcccttaataagatgttctgccagttggctaagacgtgtcctgtgcagctttgggtggacagcactcctccacctgggactcgggtacgtgctatggctatttacaagcagtctcagcacatgacagaggtcgttcggcgctgtccccatcacgaacgctgttcggattcggatggccttgccccaccccagcacctgatcagagtcgagggaaatctccgagtggaatatttggatgaccgaaacaccttccgtcatagtgtcgtggttccctacgagcctccagaggtgggtagcgactgcaccactatccattacaactacatgtgcaatagctcctgtatgggaggcatgaatcggagacccatacttacaatcatcactttagaggattcctctggtaacttgttgggccggaacagcttcgaagtgcgtgtgtgcgcgtgtccgggccgcgatcgtcgcacagaagaagagaatcttcggaagaagggggagccccaccatgagttgccacctggcagcacaaagcgagcgcttccgaataacacaagttcaagtccccaaccaaaaaaaaagcctcttgatggagagtacttcacgttgcagattagaggccgcgagcgcttcgagatgttccgggagctcaacgaagccctggagctaaaggacgctcaggcaggaaaggaacccggtggttcccgcgcccactcttcccatcttaagagcaagaagggccagtctacatctagacataagaagctgatgtttaagacagaaggacctgattcggat

SEQ ID NO: 20518 - DNA, 1179 bp, synthetic construct
  misc_feature 1..1179: note = source = /note="Description of Artificial Sequence: Synthetic coding sequence"
  source 1..1179: mol_type = other DNA
atggaggagcctcagtccgatccttcggtggaaccacctctgtctcaagagactttttccgatctttggaaacttctgccagaaaacaacgtcctctcccctctgcctagccaagcaatggacgacttgatgctgtcgcctgatgatattgaacagtggtttaccgaggatccgggtcctgatgaagcccctagaatgcccgaggctgcgccccctgtggccccggcacccgccgcacccacccccgcagcgcccgcacctgccccatcctggcctctgtctagctcagtcccttcgcaaaaaacttaccaaggttcgtacgggttccgcctcggctttctgcattcgggaacggcgaaatcggtgacttgtacttactcgcctgcactgaataagatgttctgtcagcttgctaaaacttgtcctgtgcaattgtgggtggattcgactcccccaccagggacccgggtgagagcgatggcaatttacaagcagtctcaacacatgactgaagtggttagacggtgcccacaccatgaacggtgttcggatagcgatggtcttgcaccgccccagcatctgatccgcgtggaaggcaaccttcgcgtcgaatacctcgacgacagaaatacttttcgtcacagcgtggtggtgccatacgaacccccagaagtagggagcgactgtacgaccatccattacaattacatgtgtaacagctcgtgtatggggggaatgaacaggaggccaatattgaccattatcactctcgaagatagctcaggtaatcttctcggtcgcaactcgttcgaggtgcgggtgtgcgcctgcccagggcgggatcgccgcaccgaggaggagaatctcaggaaaaagggagaaccccaccatgagctcccacctgggtccacgaagagagcccttccgaataacacctcaagctcgccacagccaaaaaagaagccccttgatggtgaatactttacccttcagattagaggaagagagagatttgagatgttcagggaactcaacgaggcactggagcttaaggatgcacaggcaggaaaggaaccaggtgggtcgagagcacatagctcccaccttaagtccaagaagggtcagtcgacgagcagacacaagaagctcatgttcaagactgaaggtcctgatagcgat

SEQ ID NO: 20519 - DNA, 1179 bp, synthetic construct
  misc_feature 1..1179: note = source = /note="Description of Artificial Sequence: Synthetic coding sequence"
  source 1..1179: mol_type = other DNA
atggaggaaccgcagtccgacccctcggtcgaacctcctctctcgcaggaaaccttctcggatctttggaaacttctgcccgaaaacaatgtcctgagccctctcccctcccaggcaatggatgaccttatgctttcaccggacgatatcgaacagtggttcaccgaagatcccggacctgacgaagcaccacggatgccagaggcagcgcctccggtggcccccgcaccggcggcccctactccagcagcacctgcaccagcaccttcttggccactgtcgtcgtccgtgccgtcacagaaaacctatcagggctcatacggttttagactgggattcctgcattcagggaccgccaagtcagtgacttgcacctactcccctgcactgaataagatgttttgtcagctggctaagacctgcccagtgcaactttgggtggactccacgccaccacctggcaccagggtgagggcaatggcgatctacaagcaatcccaacatatgaccgaagtggtccgtagatgccctcatcatgaacgttgctccgactcagatggacttgcacctccacaacatttgattagggtggaaggtaatctgcgcgtggagtacctggatgataggaatacttttcggcactcggtggtggtgccatacgaacctccagaagtgggcagcgattgtacgaccattcattacaactacatgtgtaattcaagctgtatgggaggtatgaatcgtagaccaatcctgaccatcataaccctggaagatagctcgggaaatcttctcggcagaaactcgtttgaagtgagagtctgtgcatgcccaggaagggacaggagaaccgaagaagaaaacctgcgcaagaagggtgaaccacatcacgagcttccaccaggtagcactaagcgggcgcttcctaacaacacctcctcctcaccacaaccaaagaaaaagcctcttgatggagaatactttactctgcaaatccgtgggagggagcggtttgagatgtttcgtgaacttaacgaagcacttgaactcaaggatgcacaagcaggaaaggagccgggaggttcgagggctcattcgtcgcatcttaagagcaaaaaaggacaaagcacttcacgccacaaaaagctcatgttcaaaaccgaggggcctgatagcgac

SEQ ID NO: 20520 - DNA, 1179 bp, synthetic construct
  misc_feature 1..1179: note = source = /note="Description of Artificial Sequence: Synthetic coding sequence"
  source 1..1179: mol_type = other DNA
atggaagaacctcagagcgatccatccgtggagccgcctcttagccaggagacgttctccgacctctggaaactgctgccggaaaacaacgttctctcgcccctgccatcgcaggcgatggatgacctgatgctttcgccggatgatatcgaacaatggtttactgaggatccaggaccggatgaagccccacggatgcccgaagcggcaccgccagtggcgcccgctcctgccgcacccactccagcggcccctgctccggcacctagctggcctctcagctcatcggtcccgtctcagaaaacctaccagggttcctacggtttccgcctcggattcttgcactcaggaactgccaaatcagtgacctgtacttatagcccggcactgaacaagatgttctgccaactggcaaaaacgtgcccggtgcaactgtgggtggactccactccaccaccagggactcgcgtgcgggctatggccatctacaagcagtctcagcatatgactgaggtcgtccgccggtgcccgcaccatgaacgctgttcggatagcgatggactcgcgccgccgcaacatctcatccgcgtggagggaaatcttcgggtcgaataccttgacgacagaaatacgtttcgccattcggtggtggtgccctatgagcctcctgaagtcggatcagactgcaccactatccactacaactacatgtgcaactcatcctgcatgggaggaatgaaccgtcgaccaatcctgacgatcattacccttgaggactccagcggtaacctcctgggacgcaactcctttgaagtgagggtgtgcgcctgcccggggcgggaccggcgcactgaagaggagaacctgcgcaagaagggagaacctcatcacgagctgccaccgggttccaccaaacgggcactcccaaacaatacctcgagctcaccgcagccgaagaagaagccacttgacggagagtactttaccctgcagatcaggggtagagaaagattcgaaatgttccgggaactgaacgaagccttggaactgaaggatgcgcaggccgggaaggagccggggggttcccgggcgcacagctcccaccttaagtcaaagaaggggcaaagcacctcgcgccataagaagttgatgttcaaaactgaaggcccggacagcgat

SEQ ID NO: 20521 - DNA, 1179 bp, synthetic construct
  misc_feature 1..1179: note = source = /note="Description of Artificial Sequence: Synthetic coding sequence"
  source 1..1179: mol_type = other DNA
atggaggaaccgcaatctgacccctccgtcgagccaccactgtcgcaagaaactttctcggacctgtggaagctgctgccggagaacaacgtcctctcgccgctcccaagccaggcgatggatgatctgatgctctcaccagatgacatcgagcagtggttcactgaggacccgggaccggatgaagcaccgaggatgccggaagcagccccgccagtggccccggccccggcagcccctacccccgctgccccggcccccgctccgagctggccgctgtcatccagcgtgccgtcccaaaagacttaccaaggctcatacggcttcaggcttggattcctgcactcgggcactgctaaatccgtaacgtgcacctacagcccagctctgaacaagatgttctgccagctggcgaaaacttgtccggtccagctgtgggtggactcaaccccgccgccgggcacccgcgtgcgggcaatggcgatctacaaacagtcgcaacatatgactgaggttgtcagaagatgtccccaccacgagcgctgttcagattcagatggactcgcaccgcctcagcacctgatcagagtggaaggtaaccttcgcgtggaataccttgacgatcgcaacactttcagacactcggtcgtggtcccgtatgagccgcccgaggtcggctctgattgcacgactatccactacaattacatgtgcaactcgtcatgcatgggcggtatgaatcggcggcccatcctgactatcatcaccctggaggacagctcggggaaccttctgggacgcaactcgttcgaggtgcgcgtgtgtgcctgccccgggcgcgacagacggaccgaagaagaaaatctcagaaagaaaggagaaccacatcatgaacttccgccgggttccaccaaacgcgcgctgccaaataacacctcctccagcccgcaacctaagaaaaaaccactggacggcgagtacttcactctgcagattcggggacgggagaggtttgaaatgttccgggagctgaacgaggcactggagctgaaggacgctcaagcaggtaaggaaccaggaggctcaagagcccactcttcgcacctgaagtccaagaaaggacagtccacctcacgccataagaagctgatgtttaagaccgaaggcccggattccgac

SEQ ID NO: 20522 - DNA, 1179 bp, synthetic construct
  misc_feature 1..1179: note = source = /note="Description of Artificial Sequence: Synthetic coding sequence"
  source 1..1179: mol_type = other DNA
atggaggagccacaaagcgacccgtccgtggaaccaccgctctcgcaggagactttcagcgacttgtggaagttgctgccagaaaacaacgttctgtcgcctctgccctcgcaggccatggacgatcttatgctctcccctgacgatatcgagcagtggttcactgaagatccgggacctgatgaagcacctcggatgccagaagccgcacctccggtggctccggcgccggcagcgcctacgccagcagcccccgccccggccccttcatggcctttgtcgtcgtcagtcccctcgcaaaagacttatcagggatcctacggattcagactggggttcttgcactccggaaccgccaaatccgtgacgtgcacttactcgccggccctgaacaaaatgttttgccaactcgccaagacctgtccagtccagctctgggtggactccaccccgcctcctggaactcgggtccgcgcgatggctatctataagcagtcacagcacatgactgaagtggtgcgccgctgcccgcaccacgaaagatgttcagactccgatggactcgctccgccgcagcacctcatcagggtggagggaaacctgcgggttgagtacttggacgacaggaatacgttccgccatagcgtggtggtgccatacgagccacctgaagtcggtagcgattgcaccaccattcactacaactacatgtgcaactcttcgtgcatgggaggtatgaatcgacggccaatcctgacgatcatcaccttggaagattcttcaggaaacctcctggggcgcaatagcttcgaagtccgcgtctgcgcctgtccagggcgggatcgtagaacggaggaggagaacctccggaagaaaggcgagccgcaccacgagctgccgccgggatccaccaagcgcgcacttcctaacaatacctcctcatcgccgcagccgaagaaaaaacctttggacggagagtacttcactctccagatccgaggaagggaacgcttcgaaatgttccgcgagctgaatgaagcgcttgaactgaaagacgctcaggctggaaaggagccgggcggaagccgcgcccattcctcccacctcaagtcaaagaagggccaaagcacttcgagacacaaaaagctcatgtttaagactgaaggcccggattctgat

SEQ ID NO: 20523 - DNA, 1179 bp, synthetic construct
  misc_feature 1..1179: note = source = /note="Description of Artificial Sequence: Synthetic coding sequence"
  source 1..1179: mol_type = other DNA
atggaagaaccccagtcagacccgtccgtcgagccccccctgtcccaggagacgttttccgacttgtggaaattgctcccagagaataacgttcttagcccactgccctctcaagccatggacgatctgatgttgtcccctgatgatatcgaacagtggtttaccgaggacccagggccggacgaggctccacggatgcctgaggccgcacccccggttgctcccgcgcccgcagccccgactccagccgcccctgccccagcgccttcttggccactgagtagcagcgttcccagccagaagacttaccagggatcctacggcttccgcttgggcttcttgcactcgggtacagcgaagtcagtgacctgcacttattcaccagcgctgaataagatgttttgccaattagcgaagacatgtcctgtacagctgtgggtggattctaccccgcctccgggaacaagggtccgagccatggccatctataaacagtcacagcacatgacggaggtcgtcaggaggtgcccacatcacgagaggtgttcggacagcgatgggctggccccaccacagcatttgataagggtagagggaaatcttcgcgtagaatatcttgacgaccgcaataccttcagacacagtgtggtggtgccttacgagcccccagaggtaggcagcgactgcactacgattcactataactacatgtgtaatagcagctgtatgggaggtatgaaccgacgaccgatcctgactatcataacccttgaggactcgtccgggaacctgcttggccgtaattctttcgaggtgagggtatgcgcatgtcctggccgggaccgccggacagaagaggagaacttaagaaagaagggagaaccccaccacgaactcccacctggcagcaccaaacgcgctttgcccaacaacacgtcatcatctccacagcctaagaaaaaaccccttgatggagagtacttcaccctccagatcaggggccgcgaacggtttgagatgttcagagagctgaatgaagcccttgaattgaaggatgcacaagccgggaaagaacccggcgggagtagagcccacagtagccaccttaagagcaaaaagggccaatctaccagcaggcataaaaaactgatgttcaaaactgagggcccagatagtgac

SEQ ID NO: 20524 - DNA, 1179 bp, synthetic construct; identical to SEQ ID NO: 20516
  misc_feature 1..1179: note = source = /note="Description of Artificial Sequence: Synthetic coding sequence"
  source 1..1179: mol_type = other DNA

SEQ ID NO: 20525 - DNA, 1179 bp, synthetic construct
  misc_feature 1..1179: note = source = /note="Description of Artificial Sequence: Synthetic coding sequence"
  source 1..1179: mol_type = other DNA
atggaggaaccacaatccgatccgtcggtggagccaccgctctcccaggaaaccttctcggatctgtggaagttgttgccggagaataacgtcctgtcgcctctgccttcgcaggctatggacgacctcatgctctccccagatgatatcgaacagtggttcactgaggaccctgggccggatgaggccccacgaatgcctgaagcggcaccgccagtcgccccagccccagctgcccccactccggccgctccggcccctgccccctcttggccgctgtcctcctcagtcccctcgcaaaagacctatcaaggttcctacggattccggctgggcttcttgcactcaggcaccgccaagtcggtgacttgcacttactccccggcactgaacaagatgttttgccagcttgcaaagacgtgcccggtccagctgtgggtggattccactccgccgccgggaacgagggtgagagcgatggctatctacaaacagtcacagcacatgacggaagtcgtgcgtcgctgcccgcaccatgagcggtgctcggacagcgacgggctcgctccgcctcagcatctgatcagagtggaaggaaaccttcgcgtagagtacctggacgaccgaaatactttcaggcactcagtggtcgtgccttacgagcccccggaagttggctccgactgtaccacgatccattacaactacatgtgcaatagcagctgcatggggggaatgaatcggcggcccatcctgactataatcaccttggaagattcctctggaaatctgcttggcagaaattccttcgaagtccgcgtgtgtgcatgtcctggccgcgaccggcgcaccgaagaagaaaatctgagaaagaagggagaaccgcaccatgaactgccgcctggtagcactaagagagcgcttccgaacaatacctcgtcctccccacagccaaagaagaagccactggatggcgaatacttcactctccagatcaggggacgggaacggttcgaaatgttcagggagctgaacgaggcactggaactgaaggatgcccaagcgggaaaggagcctggaggatcgcgggcacactcctctcaccttaagtcgaagaagggtcaatcgaccagccgccacaagaaacttatgttcaaaaccgagggaccggactcggat

SEQ ID NO: 20526 - DNA, 1179 bp, synthetic construct
  misc_feature 1..1179: note = source = /note="Description of Artificial Sequence: Synthetic coding sequence"
  source 1..1179: mol_type = other DNA
atggaggaacctcaatcggatccgagcgtggaaccgcctctgtcacaggaaaccttcagcgacctctggaagctgttgccggagaataatgtgctgagcccactgccgtcccaagcaatggacgatctgatgctgagcccagatgacattgagcagtggtttaccgaggaccctggtcctgatgaagcacctcgaatgcctgaagctgcacctcccgttgcccccgcaccagcagctccaactcctgcggccccggcaccagccccctcgtggcctctttcctcttcagtcccttcgcaaaaaacttaccagggctcctatggatttcgccttgggttccttcatagcggcactgcaaagtcggtgacctgtacttacagccccgcgttgaacaagatgttctgtcagctggccaagacctgccctgtgcagctttgggtggactccaccccaccacctgggacccgagtgcgagcgatggcgatctacaagcagagccaacacatgaccgaagtggtgcggcggtgtcctcaccatgagagatgctcggactcggacggactcgcaccaccccaacatctgatccgagtggagggaaacctccgcgtggaatatctggatgatcgcaatacttttcggcatagcgtggtcgtcccctacgagcccccggaagtgggatcagattgtacgaccattcactataactacatgtgcaattcctcttgtatgggcgggatgaataggcgccctattcttaccataatcaccctggaagattctagcggaaaccttcttggtcgcaattcctttgaagtcagggtgtgtgcatgcccaggacgagatagaaggaccgaggaagaaaacctgaggaaaaaaggtgagccgcaccacgagctgccacccggatcgaccaaacgcgcccttccaaataacacttcgtcgtccccccaaccaaaaaagaagcctctggacggagagtactttaccctgcagattagagggagagaaaggttcgaaatgttccgcgaactgaatgaagcactggagcttaaggacgcgcaggccggtaaggagcctggcgggtcgagagctcattcgagccatcttaagtcgaagaagggacagagcacttcgcggcacaagaagttgatgtttaagaccgagggaccagactccgat

SEQ ID NO: 20527 - DNA, 1179 bp, synthetic construct
  misc_feature 1..1179: note = source = /note="Description of Artificial Sequence: Synthetic coding sequence"
  source 1..1179: mol_type = other DNA
atggaggagccgcaatccgaccctagtgtggaaccaccgctgagccaagagaccttttccgatctttggaaactgttgcctgagaataatgtgctgagcccactcccttctcaggccatggatgacctgatgttgagtccagacgacattgaacaatggttcactgaggatcctgggcctgatgaagcacctcgcatgcccgaggcggccccaccagtggcgccggcccctgctgcaccaactccagctgcccctgctcccgcgccgtcatggcctctttcctcctccgtgccatctcagaagacataccaggggagctatggcttcagactcggattccttcatagcggtaccgctaaatccgtgacatgcacctacagtcctgctcttaacaaaatgttctgtcaactcgctaagacctgccccgtacagttgtgggtggatagtacccctccgcccggtacccgggtgcgagcaatggctatttacaaacagagccagcatatgactgaggtggtgagaagatgtccgcatcacgaaaggtgttccgactctgatgggctggctccaccccaacatttgatcagggtggaggggaaccttcgcgtcgagtatctcgacgacaggaatacttttaggcactcagtggttgtgccttacgaaccgccagaggttggtagcgattgtacgactatacattacaattacatgtgcaacagtagctgcatgggggggatgaaccggcgacctatcctgactattattacactggaagacagctctggaaatcttctcggtcggaattccttcgaagtccgcgtgtgcgcttgtcccggtcgcgacagacgcactgaggaggaaaacctgaggaagaagggggaacctcatcacgaactgccacccgggtccactaagagagcactcccaaacaatactagttcctcaccacagccaaaaaagaagcctttggatggtgaatactttacactgcaaatcaggggtagggaacgctttgaaatgttcagggagctcaacgaagcactggagctcaaagacgcccaggcgggcaaagagcccggaggaagcagggctcactctagtcacctgaaatcaaagaagggccagagcacttcccgccacaaaaagctcatgtttaagacagagggtccagacagtgat

SEQ ID NO: 20528 - DNA, 1179 bp, synthetic construct
  misc_feature 1..1179: note = source = /note="Description of Artificial Sequence: Synthetic coding sequence"
  source 1..1179: mol_type = other DNA
atggaggaacctcaatccgacccgagcgtggagccaccgctctctcaggaaactttctcggatctgtggaagctcctgcctgaaaacaacgtgttgtcccctctcccgagccaggccatggacgacctgatgctctccccggatgacatcgaacaatggttcactgaagatccaggcccagacgaagcgcctcggatgccggaagccgcgcctccagtggcgccggcaccagcggcacccaccccggctgcgccggcaccggctccttcctggcctctgagttcatctgtcccttcacagaaaacttaccaagggagttacggtttccgactcggatttctgcactcagggaccgcaaagtccgtcacgtgtacctactcgccagcgctgaataagatgttctgccagctggccaagacttgtccggttcagctctgggtcgactcgacccctccaccaggaacccgggtgagggcaatggccatctataagcagtcgcaacatatgaccgaagtggtacgccggtgcccgcatcacgagcggtgcagcgactccgacggcctcgccccgccccagcacctgattagggtggagggaaacctgagggtggagtaccttgacgatcggaacactttccgccattcagtggtcgtgccctacgagccccccgaagttggatccgactgtaccaccatccattacaattacatgtgcaactcatcctgcatgggaggcatgaatcggcggccgatcttgactatcataacgttggaggatagctcaggcaatctgctcggcagaaactcgttcgaggtgagggtgtgcgcgtgccctggacgcgaccgtaggactgaagaggagaacttgcggaaaaaaggggaaccgcaccacgagctcccaccgggatcgacgaaaagggcccttccaaacaacacctccagctccccgcagccaaagaagaagccgctggatggagagtactttacccttcagatccgcggacgcgaacggttcgaaatgtttagggaactcaatgaagctctggaactcaaagatgcacaggccgggaaggaaccaggaggatcgcgggctcactcttcgcatctgaaatctaaaaagggacaatccacctcgcgccacaagaaacttatgtttaagactgagggacccgattccgat

SEQ ID NO: 20529 - DNA, 1179 bp, synthetic construct
  misc_feature 1..1179: note = source = /note="Description of Artificial Sequence: Synthetic coding sequence"
  source 1..1179: mol_type = other DNA
atggaagaaccacagtcggacccatcagtagaacctccactttctcaggagacgttttcagatctttggaagttgttgccagaaaacaacgttctgtccccacttccatcccaagcgatggacgatttaatgctttctccagatgatatcgaacaatggtttactgaagacccaggtcctgatgaagcacctcgcatgccggaggccgctcctccagtagcccccgctccggcggcaccaacaccggctgcgccagctccggctccatcgtggccattgtcatcttcagtcccatctcaaaaaacctatcaaggctcatacggattcagactcggttttcttcacagtggcacagccaagtcagtgacgtgcacctacagtccagccctgaataaaatgttctgtcaattggcaaaaacctgtccggttcagctctgggtagattcgacaccaccaccaggtactagggtacgtgctatggctatttataaacaatcacaacacatgactgaggtagtaagaaggtgtccacaccatgaaagatgttcagatagtgatggattggcgcctccacaacatctgattcgggttgaaggaaatttaagagtggaatacttagatgatcgtaacaccttcaggcactctgttgtagttccatacgagccaccagaggttggaagtgattgtacaactattcattataattatatgtgcaattcatcgtgtatgggcggaatgaaccgtcgtccaatccttacaatcatcacactcgaagattcgtctggaaaccttttaggcagaaattcgtttgaagtaagagtgtgtgcatgccctggtagggatcgtcgtactgaggaagaaaatctgcgaaagaaaggtgaaccacatcacgaattgccaccgggttctacaaaacgggcattgcctaataacacttcaagttctccgcagccaaagaagaagccactcgatggggagtactttacgttgcaaataagaggtcgtgaacgattcgaaatgttccgagaacttaatgaagctttagaattgaaggacgcccaggctggaaaggaacctggaggatcgcgcgcacactcatcacaccttaaatcgaagaagggacaatccaccagccgacataagaaattgatgttcaagacagaaggaccagattcggat

SEQ ID NO: 20530 - DNA, 1179 bp, synthetic construct
  misc_feature 1..1179: note = source = /note="Description of Artificial Sequence: Synthetic coding sequence"
  source 1..1179: mol_type = other DNA
atggaggaacctcagtcggacccgagcgtagagccccctttatctcaggagactttttcggacctctggaagctcctgcccgaaaacaacgttctgtcccctctgccgtcacaggccatggacgacctgatgttaagccctgatgatatcgagcaatggttcaccgaagacccaggacccgacgaggcccccagaatgccagaggccgcaccacctgtcgctcctgctcccgccgccccaactccggctgctcctgcccccgcgccaagttggcccctctcgtcttcggtacccagccagaagacctatcaggggtcttacgggttccggctgggattcttgcactctggaacggccaagtccgtgacgtgcacatacagtcctgcgctgaataaaatgttttgccagctcgcgaagacttgccctgttcagttgtgggttgattcaacgccccccccgggaacccgggtgcgagctatggctatctataagcagagtcagcatatgacggaggtggttcggcgatgtccacaccacgagcgttgctcggacagcgatgggcttgcccccccccagcatctgatccgcgttgaagggaatctgagagtggagtaccttgacgaccgcaacacttttcgacatagtgtcgtagtaccttacgaaccaccggaagtcgggagcgactgtacaaccatccattacaattacatgtgtaattccagttgcatgggcgggatgaaccgccgtccaatactgaccatcataacgctcgaagactcatctggcaacctattgggtaggaactccttcgaggtgcgggtgtgtgcctgccccgggagggatcgcagaaccgaggaagagaatctgcgcaagaagggcgagccacatcacgaactgccacccggctcgacgaaaagagccttgcccaataacacctcttcaagcccacaaccaaagaagaaaccccttgacggagagtacttcactctacagatccgtggtagagagcggtttgaaatgtttcgcgagctaaatgaggcactggagctgaaagatgcccaggccggcaaggagccaggaggttcccgtgcacattctagtcacctgaaaagcaaaaaaggacagtccaccagcagacataagaaactgatgttcaagacggaggggcccgacagcgac

SEQ ID NO: 20531 - DNA, 1179 bp, synthetic construct
  misc_feature 1..1179: note = source = /note="Description of Artificial Sequence: Synthetic coding sequence"
  source 1..1179: mol_type = other DNA
atggaagagccccagtcagatccatcagtagagccccccctcagccaagagaccttctctgatctctggaaactcctgcccgagaacaacgtcttgtctcccctgcctagccaggctatggatgatttaatgctgtctccagacgatatagagcagtggttcaccgaggatccaggaccggacgaagctccaaggatgcccgaggctgcacctcctgtcgcccctgctccagccgcacctactccagccgctcctgctcccgctcccagctggccactcagcagttctgttccctctcagaagacatatcaagggtcatacggcttcagattgggatttcttcatagcggcactgcaaaaagcgtgacgtgcacttactctccggctctgaataagatgttctgccaactcgctaagacctgtccagttcagctgtgggtggattctacgcccccacctggtacccgtgttcgggctatggccatatataagcagagtcagcatatgactgaagtcgtgaggagatgcccccatcatgagaggtgtagcgacagcgatggcctggctcctccacagcaccttatccgggttgaggggaacctgagagtggaatatctggatgacaggaacactttccgccacagcgtggtagtgccatacgagcctcccgaggttggaagcgactgcactaccatccactataactatatgtgcaacagctcttgcatgggcggaatgaacagaaggccaatcttaaccattatcacactagaagacagcagcggcaaccttctgggcagaaactccttcgaggtgcgtgtgtgcgcttgtcctggaagggatcgccgaactgaagaagaaaaccttaggaagaaaggcgaaccacaccacgaactgcctcccggatctaccaaaagggcgctcccgaacaataccagctcgagccctcagcctaaaaaaaaacctctggatggcgaatattttacactccagatccgtggtcgcgagcgttttgaaatgtttcgggagttgaatgaggccttggaactcaaggatgcacaggcaggcaaggagcccggagggtcccgtgctcacagctcacacctgaaaagcaagaagggccagtccacctcccgccacaagaagctcatgtttaagaccgagggccctgattctgat

SEQ ID NO: 20532 - DNA, 1179 bp, synthetic construct
  misc_feature 1..1179: note = source = /note="Description of Artificial Sequence: Synthetic coding sequence"
  source 1..1179: mol_type = other DNA
atggaggagccgcaatcggatccttccgtggaaccgcctctcagtcaggaaactttctccgacctgtggaagctgctgcccgagaacaacgtcctctctccacttcccagccaggcaatggatgacctgatgctgagccctgacgacatcgaacagtggttcactgaagatccaggaccagacgaggctccgagaatgcccgaagccgcgccaccggtagccccggcacccgccgcaccgaccccggctgcacctgctcccgcgccatcatggccacttagttcgtctgtcccatcgcaaaaaacttaccaaggatcgtacggctttcgtcttggttttctgcactctggaaccgcgaagtcggtgacctgcacgtattcgcctgcgctgaacaaaatgttctgtcaactcgccaagacgtgcccggtgcagctgtgggttgactccaccccgccgccggggactagggtgcgggccatggccatctacaaacagagccagcacatgactgaggtggtgcgccggtgtccacaccatgagcggtgtagcgactcggatggattggctccaccacagcacctgatccgtgtggaaggtaacctgcgggtggaatacctcgacgatagaaacacttttagacactcggtggtggtcccctacgaaccacctgaggtcggatcggactgcaccacgatccattacaattacatgtgcaattcctcgtgcatgggaggcatgaatcgccgcccaatcctcactatcattaccctggaagatagctccgggaatctgctgggcaggaattcgttcgaagtccgggtgtgcgcatgcccgggacgggacagacgcaccgaggaagaaaacttgcgcaagaagggcgagccgcatcacgaactccctccgggttccaccaagcgcgccctcccaaacaacacctcctcgagtccccagcctaagaaaaagccattggatggcgagtacttcactcttcaaattcggggacgcgaaagattcgaaatgtttagggagctcaacgaggcgctcgaactgaaagacgcccaggccggaaaggaacctggaggctcacgcgctcactcatctcatctgaagagcaaaaagggacaatctacttcccggcataagaaattgatgttcaagaccgaggggccagactcggat

SEQ ID NO: 20533 - DNA, 1587 bp, synthetic construct
  misc_feature 1..1587: note = source = /note="Description of Artificial Sequence: Synthetic coding sequence"
  source 1..1587: mol_type = other DNA
atgcttctcgccgtcttgtactgccttctttggtccttccaaacttcggcaggtcactttccacgggcatgtgtgtcgtccaagaatcttatggagaaggagtgctgccctccttggagcggtgatagatcaccctgcggtcaactttcggggcgcggatcctgtcaaaacattcttctctcaaatgcacctcttggacctcagttccctttcaccggagtcgatgatagggaatcatggccttccgtgttttacaatcggacttgtcagtgctcaggaaactttatggggtttaactgcggaaattgcaaatttggattttggggcccaaactgtaccgaaagaagattgctggtgaggagaaacatctttgatctgtccgcaccagaaaaggataagttcttcgcctacctgacgctcgcaaagcacacgatttcctcggattacgtgatacccatcggaacctatggacaaatgaagaacgggagcactcccatgtttaacgacataaacatctacgacctctttgtctggatgcattactacgtttcaatggacgcccttctgggcggttccgaaatctggcgcgatatcgatttcgcgcacgaagccccagcatttcttccatggcataggctttttctgctgaggtgggaacaagagattcaaaaactgactggagatgaaaactttactatcccttactgggactggagagacgcagagaaatgcgacatctgcaccgatgaatacatgggcggtcagcacccaaccaatccgaatctgctttcgccagcctcattcttttcgtcgtggcagattgtctgttcacgcctggaagaatacaactctcaccagtcactttgcaatggaacgccggagggtccactcagacggaacccaggtaaccatgataagtcgagaacccctcggctgccgagctccgcagatgtcgagttttgtctttcgttgacccagtacgagagtggctcgatggacaaagcagcgaacttttcattccgcaatactctcgagggattcgcttcgcctcttaccgggattgcagatgcgtcgcaatcctcaatgcataacgcacttcacatctacatgaatgggactatgagccaggtccaaggaagcgctaacgacccaatattcctccttcatcatgcctttgttgactctatctttgagcagtggctgcgtcggcatcgcccgcttcaggaagtctaccccgaggccaacgcgcccatcggtcataaccgtgaatcgtacatggttccatttatccctctctaccggaatggagactttttcatatcctccaaggatttggggtatgattactcctatctccaagactcggacccggattcctttcaggattacattaagagctacctcgagcaagcctctcgtatttggtcatggctcctgggtgcagcaatggtgggtgccgttcttactgctctcttggccggccttgtcagccttctttgtagacataaacggaagcaactgccagaggagaagcaaccgcttctgatggagaaagaagattaccactcgctgtaccagtcgcatctc

SEQ ID NO: 20534 - DNA, 1587 bp, synthetic construct
  misc_feature 1..1587: note = source = /note="Description of Artificial Sequence: Synthetic coding sequence"
  source 1..1587: mol_type = other DNA
atgctcctggcagtgctgtactgcctcctgtggagttttcagacaagcgccggccattttcctagagcatgcgtctcaagtaaaaaccttatggaaaaagagtgctgccccccttggagtggagacaggagcccctgtggtcaactctctggacgcggatcttgtcagaacatcctgctgtcaaacgccccactcggcccccagtttcccttcaccggtgtcgatgatagggagagctggccaagtgtgttttacaatagaacttgccagtgctcagggaattttatgggcttcaactgtggtaactgtaaatttgggttctgggggcctaactgtaccgagagaaggctgcttgttagaaggaacatcttcgatctgagcgctcccgaaaaagacaagttctttgcctacttgacactggctaagcatactattagctcagactacgtgattcccatcggaacatacggccaaatgaagaacggttccacccctatgtttaacgatataaacatctacgatctctttgtgtggatgcactattatgtaagcatggatgcgctacttggcggctccgaaatctggagggatatcgattttgcccatgaggcaccagccttccttccttggcacagattgttcctgctgcgttgggagcaagaaatccaaaagctgaccggggacgaaaacttcaccataccctattgggactggagggacgccgagaagtgcgatatatgcacagacgaatacatgggtggacaacacccgactaaccccaacttgctctctccggccagctttttttcttcctggcagatcgtgtgttccagattggaagaatataactcacaccagagcctctgcaacggcactccagaaggacccttgcgccggaatccaggaaaccacgacaagagtagaacacccagacttccttccagtgcagatgtggaattttgcctgagtctcacacagtatgaatccggctctatggataaagctgccaactttagcttcaggaacaccctggagggtttcgcaagcccactgactgggattgccgatgcttctcaatcttctatgcacaacgcactccatatatacatgaacgggactatgagtcaagttcagggaagtgcgaacgacccgatctttctcttacaccatgcgttcgttgattctatctttgagcaatggcttcgccgccaccgcccactgcaggaagtgtatccagaagccaacgctcctatcggccacaatcgcgaatcttatatggttccattcatcccactgtatcgtaacggcgatttcttcatttccagcaaggacctgggatatgattactcttacctgcaggacagcgatccagattcatttcaggactatattaaatcttacttggagcaggcttcgcgtatatggagttggttgctgggagcagcaatggtgggggcagttttaacagccctgctggctggtctggtatcactgctttgcagacacaagcggaagcagcttcctgaagaaaagcagcctctgctgatggaaaaggaggactatcatagtctgtaccagtctcatctg

SEQ ID NO: 20535 - DNA, 1587 bp, synthetic construct
  misc_feature 1..1587: note = source = /note="Description of Artificial Sequence: Synthetic coding sequence"
  source 1..1587: mol_type = other DNA
atgctgctcgctgtgctctactgtctgctttggtcgttccagacgtccgcgggacattttccgagagcatgtgtctcatcgaaaaatctgatggaaaaagagtgctgccctccgtggagcggagacagaagcccgtgcggccagctgtcggggcggggctcctgtcaaaacatcctgctttctaatgccccgctcggaccgcagttcccattcaccggagtggatgatcgggagtcgtggccctcagttttctacaatcgtacctgccaatgttcaggaaatttcatgggatttaactgcggcaattgcaagttcggattctggggccctaactgtaccgaaaggagactgctcgtgcggagaaatatctttgatttgagcgcccctgaaaaggataagttctttgcttatctgacgttggcgaaacacaccatctccagcgattacgtgattccgattggcacctacggccaaatgaaaaacggctcgaccccaatgtttaacgacatcaacatttacgacctctttgtgtggatgcactactacgtgtcgatggacgcactgctgggaggatcggaaatctggagagacatcgatttcgctcacgaagccccagccttcctcccgtggcaccggctctttcttctgagatgggagcaagaaatccagaagctgactggagacgaaaacttcaccatcccgtactgggattggcgcgacgccgagaagtgcgacatctgcactgatgaatacatgggcggacagcacccgaccaacccaaacctcctgtcgcctgcgagcttcttctcctcctggcagatcgtgtgcagtcgcctggaagaatacaattcacatcagtccctgtgcaacggtacccccgaaggaccgctgagacggaatccgggcaatcacgataagtcacgcaccccgcgcttgccgtcctccgccgacgtagaattctgcctgagcctgacccaatacgagtccggatcgatggataaggcagcgaatttctcattccgcaacactctggaaggcttcgcgtcccccctcactggcattgccgatgcatcccaaagcagcatgcacaatgcgctgcatatctacatgaatggaactatgtcgcaggtgcaggggtccgctaacgatccaatctttttgcttcaccacgctttcgtcgatagtatcttcgagcaatggctgcgccgccatcggccccttcaggaggtgtacccggaggcaaacgcccctatcggccacaatagggaatcatacatggtccccttcatcccgctgtaccggaatggtgacttctttatcagcagcaaagatctcggctacgactactcgtacttgcaagattcggatcctgattcgtttcaagactacatcaaatcgtatctcgagcaagccagccgcatctggagctggcttctgggagccgcgatggtgggagcggtccttactgctctgctggcagggttggtgtcgctgttgtgcaggcacaagcgcaagcagctgccagaagaaaagcaaccacttctgatggagaaagaagattaccacagcctctaccaatcacatctt

SEQ ID NO: 20536 - DNA, 1587 bp, synthetic construct
  misc_feature 1..1587: note = source = /note="Description of Artificial Sequence: Synthetic coding sequence"
  source 1..1587: mol_type = other DNA
atgctcctcgcagttctgtattgcctcctgtggtcttttcagacttccgcgggacattttcccagggcatgtgtgtcgtcaaagaaccttatggaaaaagaatgctgtcctccgtggagcggggatagatcgccatgcggacagttgtccggtcgcgggtcctgtcaaaacattctgcttagcaacgcacctctgggtccccagttcccttttaccggtgtcgatgacagggaatcctggccttccgtcttttacaaccggacctgtcaatgttcaggtaacttcatggggtttaactgcggaaattgcaagtttggattctgggggcccaactgtaccgagagaaggctgcttgtgcgaaggaacatatttgatcttagcgcacctgaaaaggacaagttttttgcgtaccttacccttgcaaagcataccatcagctccgattacgtgattcctatcggaacttatggccagatgaagaacggatcgactccgatgtttaacgacattaacatctacgatctttttgtgtggatgcattactatgtgtcaatggatgcactccttggaggttctgaaatctggcgtgatattgattttgcccatgaggctcctgcatttcttccttggcatcgcctgttccttctgaggtgggaacaggaaattcagaagctgactggggacgagaatttcaccatcccttactgggattggcgcgatgctgagaaatgtgatatctgtacggatgaatacatgggtggacagcatccgaccaaccccaacctcttgagtccggcctcgttcttttcgtcatggcagattgtctgttcacgccttgaagaatacaattcccaccagtcgctctgtaacggaacccctgaagggcctctgcgaagaaaccctggtaatcacgataaaagcagaaccccacggcttccctcctcggcagatgtcgaattctgtctttcacttacccaatatgaatcaggaagcatggataaggcagccaactttagctttagaaacactttggagggttttgcttcgccacttaccggaattgcagatgcatcacaatcgagcatgcataacgcattgcacatctacatgaatggcactatgtcgcaggttcagggctcggctaacgatcctatctttctgttgcaccacgcctttgtggattcgatcttcgagcaatggcttcgccggcataggccactgcaagaagtgtaccccgaagcaaatgctccgattggacataacagagaaagctacatggtgccttttatcccactgtacagaaacggcgactttttcatctccagcaaggatttgggctacgattactcgtacctgcaggactcggatcctgactcctttcaagattacattaagtcatatctggaacaggcatcccgtatttggtcctggcttcttggtgccgcaatggtgggggccgtgcttaccgccctcctggcaggacttgtctccctgctgtgccgacataagagaaagcagcttcctgaagaaaagcaaccactccttatggagaaggaagattaccattcactctatcagtcgcacctg

SEQ ID NO: 20537 - DNA, 1587 bp, synthetic construct
  misc_feature 1..1587: note = source = /note="Description of Artificial Sequence: Synthetic coding sequence"
  source 1..1587: mol_type = other DNA
atgctccttgcagttctttactgccttctttggtcattccaaacctcggccggccactttccgcgagcctgcgtcagctccaagaatctgatggaaaaagaatgttgccctccgtggtccggtgaccgcagcccttgtggacaactcagcggccggggaagctgtcagaacatcctcctgagcaacgcgccgttgggaccacagttcccgttcaccggcgtggacgaccgcgaatcctggccgtccgtgttttacaatcgcacctgccagtgcagcggaaacttcatgggattcaattgtggcaattgcaagtttggtttttggggtccgaactgcactgagcgccgccttttggtccggcgtaacattttcgatctgtcagcgccggagaaagacaagttcttcgcgtacctgacgctggccaagcacaccatctcttcggattacgtcatccctatcggcacttatggccagatgaagaatggaagcactccgatgttcaacgacatcaacatctacgacctgtttgtgtggatgcactactacgtgtcaatggacgcgctgctcggcggttcagaaatttggcgggatattgattttgcacacgaagctcctgcctttctgccgtggcatcgcctgttcctgctgcggtgggagcaagaaattcagaaactgaccggagacgaaaacttcacgatcccatattgggactggcgtgatgcagagaagtgtgatatctgcacggacgagtacatgggaggacagcacccgactaatccaaacctgctctcgcctgcctcctttttctcatcttggcaaatcgtgtgctccagactcgaggaatacaattctcatcagtcgctgtgcaatgggaccccagaaggaccgctccgtcggaacccgggcaaccatgataaatcaaggactccgcggctcccttcttctgcagacgtggagttctgcctctccttgacccagtacgagtcgggatcgatggataaggctgcaaacttctccttccggaacactctcgaggggttcgcctccccactgactggaattgcagacgcctcacagtcctctatgcataacgccctccacatctacatgaacggaaccatgtcgcaggtccagggtagcgctaacgacccaatctttctcttgcatcatgcattcgtggattccatcttcgaacagtggctgagacgccacagacctctgcaagaagtctacccagaagcaaatgctcccatcggacacaatcgcgaatcttacatggtgccgttcatccccctgtacagaaatggggactttttcatctcgtcaaaggacttggggtacgattactcatatctgcaagacagcgaccccgatagcttccaagactacatcaagtcgtaccttgaacaggcctcgaggatctggagctggctcttgggggccgcgatggtgggagccgtgttgaccgccctcttggcgggcctggtgtccctgctgtgcaggcacaaacgcaagcagctcccagaggagaagcaacccctgctgatggagaaggaagattaccattccctctatcagagccacctg

SEQ ID NO: 20538 - DNA, 1587 bp, synthetic construct
  misc_feature 1..1587: note = source = /note="Description of Artificial Sequence: Synthetic coding sequence"
  source 1..1587: mol_type = other DNA
atgctgttggctgtactttattgtctgctctggtccttccagactagcgctggacactttccaagagcctgcgtctcatctaaaaacttgatggagaaggaatgttgtcccccctggagtggcgaccggagcccatgtggccaactctctgggagaggttcttgtcagaacatactgctgtccaacgcacctctgggcccacagttccctttcactggagtcgatgacagggagtcctggccttctgtgttctacaaccgaacatgccagtgctccggtaattttatggggttcaactgcgggaactgcaagttcgggttttggggtccaaactgtacagagaggcggctcctggtgcgacgcaatatttttgacttgtcagcccccgaaaaagacaagttttttgcctatctgacattggctaagcacacgatctcatccgattacgtgatccccatagggacctacggccaaatgaagaacggtagtaccccgatgttcaatgacatcaatatttatgaccttttcgtgtggatgcattattatgtatctatggacgctcttttgggtggttcagaaatctggcgggacatcgattttgcacacgaagcgcccgcctttcttccctggcatcgactgtttctcttgaggtgggagcaggaaatccagaagctcactggcgatgagaacttcaccattccatattgggactggagggacgctgaaaagtgtgatatctgcactgacgagtacatgggcgggcagcaccccaccaatcccaatttgctgtcccccgcatccttcttttcatcatggcagattgtctgctctagactggaggagtataactcacaccaaagtctgtgtaacggtacgcctgagggtcccctgcgacgaaaccccggaaaccacgataagtcacgaactccccggctgcccagcagtgcggacgttgaattctgccttagcctgacccaatacgaatctggctctatggataaggcagcaaactttagttttaggaatacactcgaaggctttgctagtccccttaccggtattgcagatgccagtcagtcttcaatgcataacgcgctgcatatttacatgaacgggactatgagccaggtgcagggtagcgctaacgatccaatctttcttctgcaccacgctttcgtcgacagcatctttgagcagtggctcagacgccaccggcccctccaggaggtctatccagaggccaacgcacccattggccacaaccgagaaagctatatggtgcccttcataccactgtacaggaacggtgacttcttcattagctctaaagacctgggatatgactattcttacttgcaggactcagatccagacagcttccaggactatattaaatcttatctggagcaggcaagtaggatttggagttggctgctgggggctgctatggtcggcgctgtccttacggccctgctggccgggctggtgagcctcctgtgtcgccacaaaagaaaacagctgccagaagagaagcagccattgctgatggagaaggaagactaccacagcctctatcagtctcacctc

SEQ ID NO: 20539 - DNA, 1587 bp, synthetic construct
  misc_feature 1..1587: note = source = /note="Description of Artificial Sequence: Synthetic coding sequence"
  source 1..1587: mol_type = other DNA
atgctactagccgtcttgtattgtttgctgtggtcgtttcagaccagcgccgggcacttcccaagagcgtgtgtctcgagcaagaaccttatggagaaggaatgttgcccaccatggagcggcgataggagcccatgtgggcagttatcgggaagaggctcatgtcaaaacatcctcctgagcaatgcacccttgggtcctcaattcccattcaccggagtggacgacagagaatcttggcccagcgttttttacaataggacatgtcaatgttctgggaatttcatggggtttaattgtggtaactgcaaattcggcttttggggacccaactgtacagaacgacgcctgctcgtgagacgaaacatttttgatctatcagcacctgaaaaggacaagttcttcgcttacttgactctggcgaaacacactatatctagcgactatgtgattccaataggtacttatggccagatgaaaaatggctcaacccctatgtttaacgacataaacatatatgacctctttgtatggatgcattattacgtgagtatggacgctctgttgggaggatctgagatctggagggatattgatttcgctcatgaagcgccagccttcctgccatggcaccgcctgttcctgttgcggtgggagcaggagatccagaaactgactggcgacgaaaatttcaccatcccttactgggattggcgcgacgcagagaagtgtgatatctgcacggatgagtatatgggaggccagcacccaacaaacccaaatctgctttcccctgctagctttttctcgtcctggcagattgtatgttcccgcctggaagaatataattcccatcagtctttgtgcaacggcactcccgaaggccctttgcgaaggaaccccggcaaccatgacaagagtcgcacacctaggttgccctcctccgcagacgtcgaattttgcctgagccttacccagtatgagagcggttctatggacaaagccgctaacttctccttcagaaacacattggagggtttcgcctccccattgactggcatagctgatgcatcccagagttcgatgcataacgctctgcacatctatatgaacggcactatgtcccaggtacagggcagcgcaaatgaccccatctttttactgcatcacgcctttgtggatagcatatttgaacagtggttacggaggcaccgacccctccaagaggtttacccagaggccaacgcacccatcggtcacaaccgagagagctacatggtgcctttcatccctctctataggaacggcgacttttttataagcagtaaggatttgggatacgattactcttacctgcaggactctgaccccgattccttccaagactatataaaatcctacctggaacaggcttctcgcatctggtcatggctgctaggggccgccatggtgggggctgtactgaccgccttgctcgcaggattggtgtccctgttgtgcaggcacaagcggaagcagttaccggaagaaaagcagcctcttctgatggagaaggaagattatcatagcctctaccagtcacacctc

SEQ ID NO: 20540 - DNA, 1587 bp, synthetic construct
  misc_feature 1..1587: note = source = /note="Description of Artificial Sequence: Synthetic coding sequence"
  source 1..1587: mol_type = other DNA
atgctcctggcggtcctctactgtctgctctggtctttccagacctccgccggtcattttcctcgggcctgcgtgtcgtccaagaacttgatggaaaaggaatgctgcccaccatggtccggggatcgctcaccgtgcggacaacttagcggacgcggttcatgtcaaaacattctcttgtccaacgcgccgttggggccgcagtttccattcaccggtgtggatgacagagagtcctggcccagcgttttctacaatagaacttgtcaatgctccggaaatttcatgggcttcaactgtggcaactgtaagttcggcttctggggaccgaactgcaccgagcggcgccttctcgtgcggcggaacatcttcgacctgtccgccccggagaaagacaagttctttgcatatctcactcttgccaaacatactatcagctcagactacgtgattcccattggaacttacggacaaatgaaaaacgggtcgactccaatgttcaacgacatcaacatatatgatcttttcgtctggatgcattactacgtgtcgatggacgcgctgctcggggggtccgagatatggcgcgacatcgacttcgctcatgaagctcctgcattcttgccgtggcatagactcttcctcttgagatgggaacaggagatccaaaagctcactggtgacgagaacttcactatcccgtactgggattggcgcgacgccgaaaagtgtgatatttgcacggatgagtatatgggaggacaacatcccaccaacccgaatttgctgtcgccagccagctttttcagctcctggcagatcgtgtgctcccggctggaggaatacaactcgcatcagtcgctctgtaatggaacgccggagggcccactgcggcgcaatcccggaaaccacgataagtctaggacccctagacttccgtccagcgcggatgtggaattttgcctgtcgctgacccagtacgaatcgggctcgatggacaaagccgccaacttctcctttcggaacaccttggaaggattcgcctcgcccctgaccggtatcgctgacgcgagccagagttccatgcataatgctctgcatatctacatgaacgggaccatgtcccaggtgcagggctccgcaaatgacccgatctttctcctgcaccacgcctttgtcgatagcatctttgagcagtggctgaggcggcaccgaccgctgcaggaagtgtacccggaagctaacgcccctatcggtcacaacagggaatcgtacatggttccgtttatccctctgtacagaaatggtgacttcttcatctcatcgaaggacctgggctacgattactcctacctgcaggacagcgaccctgactccttccaggattacatcaagtcatacctggaacaagccagccgcatctggtcgtggttgctgggggcggcaatggtgggagccgttcttactgcactgctcgccggtctggtatcgcttctgtgcagacataagcgcaaacagctgcctgaggagaagcaaccacttctgatggagaaggaggactaccactcgctgtaccagtcacatctg

SEQ ID NO: 20541 - DNA, 1587 bp, synthetic construct
  misc_feature 1..1587: note = source = /note="Description of Artificial Sequence: Synthetic coding sequence"
  source 1..1587: mol_type = other DNA
atgcttctggcagtgctttactgtcttttgtggtcatttcagacgagcgcaggtcattttcctcgggcatgcgtgagttccaagaatcttatggaaaaagagtgctgccccccgtggtccggtgaccggtccccctgtggacagctttcaggtagagggtcgtgccagaacattcttctctcgaacgctccacttggccctcaatttccatttaccggtgtcgacgatagagaaagctggccatcggtgttctacaaccggacctgccagtgtagcggcaacttcatgggattcaactgcggaaactgtaagttcggtttttggggtcctaattgtaccgaaaggcgcctcctggttagacggaatatcttcgatctctccgcacctgaaaaggacaagtttttcgcataccttacgctggccaagcacactatctcatccgactacgtgatcccgatcggaacctacggccaaatgaaaaatggttcgacccctatgttcaacgatatcaacatatacgatctttttgtgtggatgcactactatgtgtcgatggatgcactccttggaggctccgaaatttggcgagatattgattttgcacacgaagccccagcgttcctgccgtggcaccgtctgttcctgctccgatgggaacaagaaatccagaaactgaccggagatgagaatttcactatcccatactgggactggcgcgacgccgagaagtgtgatatctgcaccgatgaatacatgggaggtcaacacccaactaaccctaacttgctgagcccggcgagctttttcagctcctggcagatcgtgtgttcgagattggaggagtacaattcccatcaaagtctgtgtaatggaacgccggaagggccccttagaagaaatcccggaaaccatgataaatcccgcaccccgagacttccctcatcggcggatgtggagttttgtctttcgctgacccagtacgaatccggatcgatggataaagcagccaacttttcgtttcgaaatactctggaaggatttgccagccccctcactggaatcgccgacgcatcccaaagttcaatgcataacgcacttcacatatacatgaacggcaccatgagccaggtgcagggaagcgcgaacgacccaatctttctgctccatcatgcatttgttgattccatctttgaacaatggctccggagacatagaccactgcaagaggtgtatcccgaagcgaacgctccaatcggtcataatcgcgaatcgtacatggtcccatttatccctctgtacaggaacggtgatttcttcatttcatccaaggatctggggtacgactactcctacctccaagattccgatcccgattcgtttcaggattacatcaaatcgtacctggagcaagcatcacggatctggtcatggctgctcggtgcagccatggtcggtgcagtgctgactgcactgttggctggactcgtctcccttctgtgtagacacaagcgtaagcaactgcctgaagagaaacaacctctccttatggaaaaggaagattatcactctctttatcaatcccatctg

SEQ ID NO: 20542 - DNA, 1587 bp, synthetic construct
  misc_feature 1..1587: note = source = /note="Description of Artificial Sequence: Synthetic coding sequence"
  source 1..1587: mol_type = other DNA
atgcttttggcggtcctgtattgtcttctgtggagtttccagacctccgctggccatttcccgcgggcttgtgtgagtagtaagaatcttatggaaaaggagtgttgcccgccctggtccggcgacagatccccttgcggacaactctcagggaggggctcctgtcagaatatcttactgagtaatgcgcctctgggtccccagtttccgtttaccggagtagacgatagagaaagctggccttccgtcttctacaatcgcacctgccagtgcagcggtaatttcatggggttcaactgcggtaactgcaagttcggattctggggacccaactgtactgagcgaaggttgctcgtgaggagaaatatctttgatttgtccgcgcctgaaaaggacaagttctttgcgtatctgaccttggccaaacacaccatatcctcggactacgtgatacctattgggacttacggacagatgaaaaacggcagcacacccatgttcaacgacattaacatatacgatctgttcgtatggatgcactactacgtcagtatggatgccttacttggaggatcggagatctggcgcgacattgatttcgctcatgaagctccagccttcttaccctggcaccgattgttccttttgagatgggaacaggagatccagaaactgacgggcgatgagaatttcaccattccctactgggattggagggacgctgagaaatgcgacatttgtactgatgaatacatggggggacaacacccaaccaatccaaacctgttatctcccgccagctttttctcctcttggcagattgtctgttcacgcctcgaggaatataacagccatcagagcctgtgtaacggcacgcctgagggccccttacgcaggaaccctggcaaccatgacaaatctcgaacaccacgcttgccctcctcggccgatgtcgagttctgtttgagcctgacccagtatgaaagcggtagcatggataaagccgccaactttagctttcgcaatacactcgaaggctttgccagccctttgaccggcattgcagatgcttcccagagtagtatgcataacgctctgcacatatatatgaatggtactatgagccaggtgcagggttccgcgaacgatccaatattcctgctccatcacgccttcgtggacagcattttcgaacagtggctccgtcgtcatcggcctctccaggaagtctacccagaggctaacgcccctataggccacaaccgcgaatcttacatggtcccttttatcccgctgtacagaaacggtgattttttcatatcctccaaggatctgggatacgattattcatacctccaggactccgaccccgactccttccaggattacattaaatcatatctggaacaggccagcagaatttggtcctggctattgggagcagccatggtaggggccgtgctcacggccctcctggctggattggtgtcgttgctttgccgccacaagaggaaacagctgccagaagaaaagcaaccactgctaatggagaaagaagactaccattccctgtatcaatcccattta

SEQ ID NO: 20543 - DNA, 1587 bp, synthetic construct
  misc_feature 1..1587: note = source = /note="Description of Artificial Sequence: Synthetic coding sequence"
  source 1..1587: mol_type = other DNA
atgctgttggccgtcctgtactgtctgttgtggagcttccaaacttccgcgggacactttcctcgtgcatgtgtctcctccaaaaatctcatggaaaaggaatgctgcccaccttggtcaggggacagaagcccgtgtggacaactgtccggacgcggctcatgtcaaaacatcttgctttcaaatgcaccacttggccctcagtttccttttaccggagtagacgacagagaaagctggccttcagtgttttacaaccggacttgtcagtgctcgggtaatttcatgggatttaactgtggcaactgtaagtttggattttggggacccaactgcactgagcgccgacttcttgtgcgtcggaacatttttgatctcagcgcccccgaaaaggacaagtttttcgcttaccttactcttgccaaacatactattagctcggattacgtgattcccattggaacttatggacagatgaaaaatggttccacccccatgttcaacgatatcaacatttatgatttgtttgtgtggatgcactactacgtgtcgatggacgcattgctcggtggttccgagatatggcgtgatattgattttgcccacgaagcacctgcctttctcccctggcatcgactgtttctgctccgctgggaacaagaaattcagaaacttactggcgatgaaaactttaccataccatactgggattggcgcgacgccgaaaaatgcgatatttgtactgatgagtacatggggggacagcatccaaccaatcccaatcttctctcccctgcaagttttttcagctcgtggcaaattgtgtgctcccgtctggaagaatacaatagccatcaaagcctttgcaacgggacccccgaaggaccccttcggcgcaaccctggaaaccatgataagtcgagaacccccaggctcccctcgtccgctgacgtcgaattctgcctttccttgacccaatacgaatccggtagcatggataaggccgcgaacttttcgttcaggaataccttggaaggatttgcatcgcccctgacggggatcgccgacgcgtcacaaagctcgatgcataacgcactccacatttacatgaacggaaccatgagtcaagtccagggatccgcaaacgacccgatttttcttcttcatcatgcgttcgtcgacagcatatttgaacagtggctgcgcagacatcgccctctgcaagaagtgtatccagaagcaaacgcccctatcggccacaacagagaatcatatatggtcccttttatccctctgtacagaaatggcgatttcttcatctcctcgaaggaccttgggtacgattactcatacctccaggattcggacccagattcgtttcaagattacattaagtcataccttgaacaggcaagccgcatttggtcttggctgcttggtgcagcgatggtcggagcagtcctgacggcactgcttgcagggcttgtgagcctcctttgccggcataagcgtaagcaactcccagaagagaagcagcctttgctgatggagaaggaagattaccactccctgtaccaatcccatctg

SEQ ID NO: 20544 - DNA, 1587 bp, synthetic construct
  misc_feature 1..1587: note = source = /note="Description of Artificial Sequence: Synthetic coding sequence"
  source 1..1587: mol_type = other DNA
atgctccttgctgtgctttattgcctcctttggtccttccagacctccgctggccatttcccgcgagcttgtgtctcctcgaagaacctcatggaaaaggagtgttgtccgccctggtccggggatcgcagcccttgtggacagctgtccggccgtggtagctgccagaacattctcctcagcaacgcccctcttggcccacagttcccgttcacaggtgtggacgaccgcgagtcctggccctctgttttctacaaccggacctgccagtgctccgggaatttcatgggtttcaactgcggcaactgcaagttcggtttctggggacccaattgtaccgagcgccgtctactcgtgaggcgtaatatttttgacttgtccgctcctgagaaagacaagttcttcgcctatcttactctggccaagcatacaatctcgtctgattacgtcattcctattggtacgtatggccagatgaagaatggatctactcccatgttcaacgatatcaacatatacgacctcttcgtgtggatgcactattacgtcagcatggacgcgctgttgggaggatccgagatttggcgcgacattgatttcgctcatgaggctcctgccttcttgccgtggcaccgcctatttcttctgcgttgggagcaggagattcaaaagctgacgggggacgagaatttcaccattccgtactgggactggcgcgacgccgaaaagtgcgacatttgcactgatgaatatatgggtggccagcaccccacgaacccgaacctcctgtcacccgccagcttcttttcgtcgtggcaaatcgtgtgctcccgcttggaagagtacaactcccatcagtccctgtgtaatggtacccctgagggccccctgcggcgcaaccccggcaaccacgacaagtcgcgtacaccgcgcctgcctagctccgccgacgtcgagttctgcctcagtctcactcagtacgagtctggttccatggacaaggccgccaatttttcgtttcggaacacattggagggctttgcctctccactgacgggtatcgccgatgcttcccagtccagcatgcacaatgcactccacatctacatgaacggaactatgtcgcaagttcagggttccgctaacgatcccattttccttcttcaccacgcatttgtggacagcatattcgagcagtggctgcgtaggcaccgtccgcttcaggaggtctaccctgaggcgaatgcgcctatcggacacaaccgcgaatcctacatggtccccttcatcccgctttataggaacggagatttcttcatctcttcaaaggatctaggttacgactactcctacctgcaggacagcgatcccgatagcttccaggattacatcaagtcctatttggagcaggccagtaggatctggtcttggctactcggcgcggcaatggtcggcgcagtgctgaccgccctgttggcgggtctggtctcactgttgtgcagacataagcgcaagcaactaccggaggagaagcaaccgctgctgatggaaaaggaggactatcattccctataccagagccacctg

SEQ ID NO: 20545 - DNA, 1587 bp, synthetic construct
  misc_feature 1..1587: note = source = /note="Description of Artificial Sequence: Synthetic coding sequence"
  source 1..1587: mol_type = other DNA
atgcttctagctgttctttactgtcttctttggtcgtttcagacatccgcggggcactttccgcgcgcatgcgtctcctcaaaaaatctgatggaaaaggaatgctgcccaccatggagtggtgatcgatccccatgtggccagctttcaggtcgtggatcttgtcaaaacattcttctatcaaatgctccattgggtccacaattcccctttacaggagttgacgatcgggaatcgtggccgtcagtcttctacaataggacgtgccagtgttctgggaactttatgggtttcaattgtggaaattgcaagtttggcttttggggacccaactgcactgaaaggcgtctgcttgttcgccgtaacatattcgacttgtcagctcccgaaaaggacaagttctttgcctatttgaccttggccaaacatactatctcgtctgattacgtcatcccaattggaacttacggtcagatgaaaaatggatctacaccaatgttcaatgatatcaacatctatgacctctttgtttggatgcactattacgtcagcatggacgcgttattgggaggctctgagatttggagagacatcgacttcgcccatgaggctccggctttcttgccatggcaccggttatttctacttagatgggaacaggagattcaaaagcttacaggtgatgaaaattttactatcccatactgggattggcgtgatgccgaaaagtgcgacatctgcaccgatgaatacatgggaggccaacacccaacaaaccctaatttgttgtccccagctagcttcttctcttcgtggcaaatagtgtgctctcgtcttgaagagtataatagccatcaatcgttatgcaacggcactccggaaggtccattgcgacgaaatcccggaaaccacgataaatcgaggacaccgaggctaccctctagcgcagacgtggaattctgtctgtcattgacacaatacgagtcaggctccatggataaagccgctaacttctcctttagaaataccttggaagggttcgccagtcctttgacaggcatcgcagacgcttcccaaagctcaatgcataatgctcttcatatctacatgaatggaactatgtcacaagtacagggatctgccaacgatcctattttccttttgcatcacgccttcgttgacagtatttttgaacaatggttgagaagacatcgaccgctgcaagaagtctatccagaagcgaatgctcctatcggacataatagagaatcttatatggtgccattcatcccactgtatcgtaatggagatttctttatttcctctaaggatctcggctacgactacagctatctacaagactcagacccggatagctttcaagactacattaaatcgtacttggaacaggcgagcagaatctggtcatggctgttgggagcggctatggttggagcagtcttgactgccttacttgcaggcttagtgtccctcctttgtcgtcataagagaaagcagttgcctgaagagaaacagccgctgcttatggaaaaagaagactaccactcgctgtatcaatctcatctg

SEQ ID NO: 20546 - DNA, 1587 bp, synthetic construct
  misc_feature 1..1587: note = source = /note="Description of Artificial Sequence: Synthetic coding sequence"
  source 1..1587: mol_type = other DNA
atgctcctggccgttctctactgtctgctgtggagctttcagacttcagcagggcactttccccgtgcctgtgtaagctcgaagaacctcatggaaaaggagtgttgccccccgtggagcggcgatcggtcaccatgcgggcagctgagtggccgtggctcctgccaaaacatcctactcagcaacgctccactgggcccccagtttccattcaccggagttgacgaccgggagtcttggccatccgtgttctacaaccgcacgtgtcaatgttctggtaattttatgggctttaattgtggcaattgtaaatttggattctggggaccaaactgtactgagagaaggctgttggtaagaagaaacatttttgacttgtcagcccccgagaaggataagttcttcgcttatctaactttagccaagcacactatatcaagcgactatgtcatccccataggaacttacgggcaaatgaagaatggatccacccccatgttcaatgatatcaacatctacgacttgttcgtctggatgcactactatgtcagcatggatgcccttcttgggggcagtgaaatctggagagacatagacttcgcccacgaggcacccgccttcctcccttggcacaggttgttcctactgcggtgggagcaagaaatacagaaactgacaggcgatgagaactttacgattccatactgggactggcgagatgcggaaaaatgcgacatctgtacagacgaatatatgggcgggcagcacccgacaaaccccaatctgctgtcacccgcttccttttttagtagctggcagatcgtctgcagccgcctggaggagtataacagtcatcagtccctctgtaacggcacacccgaaggccctttaaggaggaacccggggaatcacgataagagtcgtacccccaggctcccctcgagcgccgatgtggagttttgtttgtctctgactcagtacgagagcggaagcatggataaggcagccaatttcagttttcgaaatactctggaggggtttgcctcacccctcacagggatcgccgatgccagccagtctagtatgcacaacgcactgcatatctatatgaatggaactatgtctcaggtacaggggagcgccaatgacccaattttcctgttgcaccacgcattcgtggactccatattcgagcagtggttacggaggcacaggcccttgcaggaggtttaccctgaggcaaatgcccccatagggcataatagagaatcctatatggtccccttcattcctctgtaccgcaacggcgacttcttcataagttccaaggatttaggatacgattattcatacttacaggacagtgaccccgattcattccaggactatatcaaaagttatctggagcaagccagccgtatctggtcttggctgcttggcgctgcaatggtcggcgcggtactgacagcacttctggcaggcctggtgtcactgttatgccgccataagcgaaaacagctacccgaagaaaagcaacccctactgatggagaaagaggactaccactccctctaccaaagccacctg

SEQ ID NO: 20547 - DNA, 1587 bp, synthetic construct
  misc_feature 1..1587: note = source = /note="Description of Artificial Sequence: Synthetic coding sequence"
  source 1..1587: mol_type = other DNA
atgctgctcgccgtgctgtattgtttgctgtggtcattccagaccagcgcagggcactttccgagggcctgcgtctcatccaagaatcttatggagaaggaatgctgtcccccgtggtctggcgaccggtcaccctgcgggcagctgagtggaagggggtcctgtcagaacattctcctgtccaatgccccgctgggcccacagttcccctttacaggcgttgacgatagggaatcttggccgtccgtgttctataaccgcacatgtcaatgcagcggtaattttatgggctttaattgcgggaattgtaagttcggattctgggggcccaattgcaccgagcgtcggctgttagtccggagaaatatttttgacctcagtgcgcccgagaaggacaagtttttcgcgtatcttacactggctaaacataccatcagttccgactatgttatccccataggtacctatggtcagatgaagaatgggtcaacacctatgtttaatgacattaacatctacgacctattcgtgtggatgcactattacgtttctatggatgcacttttggggggctcagagatttggagggacatcgatttcgcacacgaggcccctgctttccttccttggcacagactgtttctgctgcgctgggagcaggagatccaaaaactgactggcgacgaaaacttcaccataccttactgggattggagggatgccgaaaagtgtgacatctgtacagatgagtacatgggaggtcagcatcctacaaatcctaacttgctttcaccggcctcctttttttctagctggcagattgtatgcagcaggctggaggagtacaattctcatcaatccctgtgtaacgggacaccggaaggtcccctgagacgcaatcctgggaaccacgacaaaagtagaaccccccggctccctagcagtgctgacgtggagttctgcctgtctctgacccagtatgaatcaggatcaatggacaaggcagccaatttcagcttccgcaataccttggagggcttcgctagccccctgacaggaatcgccgatgcgagtcagtcatctatgcacaatgccttgcacatttacatgaatggcactatgtcccaggtgcagggctctgccaacgaccccatattccttctgcatcacgccttcgttgacagcatttttgagcaatggctgcgacgacacagacctcttcaggaagtgtaccctgaggccaatgcccccataggacataaccgggagtcatacatggtcccatttatccccctctacaggaacggagatttttttatttctagcaaagatctgggttacgattattcttacctccaagattccgaccccgactccttccaggattacattaagtcttatctggaacaagcgagccggatctggtcttggttgctcggtgcggccatggtgggggctgtgctaaccgcccttctcgcgggcctcgtcagcctgctttgccggcataagcgcaagcagctccccgaggaaaagcaacctctgctgatggagaaagaggactaccattctctctatcagtcccatttg

SEQ ID NO: 20548 - DNA, 1587 bp, synthetic construct
  misc_feature 1..1587: note = source = /note="Description of Artificial Sequence: Synthetic coding sequence"
  source 1..1587: mol_type = other DNA
atgctcctggccgtcctatactgcctgctctggtcttttcagactagtgctgggcattttccaagggcctgtgtgtcatccaagaacctgatggagaaggaatgctgtcccccatggagtggcgacaggtccccatgcggccagctctctggacgaggctcctgccaaaacattcttttgtccaacgccccacttgggccccagttccccttcacaggggtggacgaccgggagtcctggccttcagtgttctataacaggacttgccagtgttccggaaacttcatggggtttaactgcggcaattgcaaattcggtttctgggggccgaattgtactgaacgaaggcttcttgttcgacgaaacatttttgacctcagtgccccagagaaagacaagtttttcgcctatttgactttagcgaagcacacaatctctagcgattatgtaattcctatcggcacatatggccaaatgaaaaatggcagtacacctatgttcaacgatatcaacatatatgatctttttgtgtggatgcattactacgtctccatggatgcactgttgggtggctccgaaatatggcgggatattgacttcgcccacgaggcacctgcctttctgccatggcaccgcttgtttctgctgcgctgggagcaggagattcagaagctgacaggcgatgagaacttcaccattccttactgggattggcgcgacgcagaaaaatgtgatatatgcacggatgagtacatgggagggcagcaccctaccaatcccaaccttttatctcctgctagttttttttcctcctggcagatagtgtgttcacgactcgaagagtacaactcacaccagtcactctgcaacggaacacctgagggtccccttagacgaaaccccggaaatcatgacaagtcgagaacaccccggctgccgtcaagtgcagatgtggagttctgcctcagcctcacgcagtatgagagcggctccatggataaggccgccaactttagctttcgtaacactctcgagggcttcgccagtccactgacaggcattgccgacgctagtcaatctagcatgcataatgctttgcatatctacatgaatggcactatgagccaagtgcaggggtctgccaatgatcccatatttctgctccatcacgcctttgttgattccatattcgagcagtggttgcggcgccatcggcccttgcaagaggtgtatcctgaagcaaacgcaccaataggacacaaccgcgagtcatatatggtgccatttatacctttgtataggaatggagactttttcattagctcaaaggatctgggatacgactacagttatcttcaagactcggaccccgattcctttcaggactacatcaaatcctacctggaacaagcctcgcgaatctggtcttggctgctgggtgctgcaatggtgggtgctgtgttgacagccctgttagcgggactagtgtcattactatgccgtcataaacgtaaacagcttcctgaggaaaagcagcccctgctgatggaaaaggaagattatcattccttataccaaagccatctg

SEQ ID NO: 20549 - DNA, 1587 bp, synthetic construct
  misc_feature 1..1587: note = source = /note="Description of Artificial Sequence: Synthetic coding sequence"
  source 1..1587: mol_type = other DNA
atgctcttggctgtgctttattgtctgttgtggtcttttcagacaagtgcgggacacttcccacgggcctgtgtaagttcgaagaacctgatggagaaggagtgttgcccaccttggtcaggagacagatccccctgcggacaacttagcgggagagggagctgtcagaatatcctgctcagtaatgcacctctaggcccccagtttccattcacaggtgtagacgatcgagagtcctggcccagtgtcttctacaacaggacctgtcaatgttcaggaaacttcatggggttcaattgcggcaactgcaagtttggcttttggggacctaattgcacggagcggagattattggtccggcggaatatttttgacttgtctgcgcctgaaaaggacaagttttttgcgtatctaacgcttgccaagcatactatctcttcagactacgtgataccaatcggaacttacggccagatgaaaaacggttccactcccatgttcaacgacatcaacatttacgacctttttgtttggatgcactactacgtatctatggatgctttgcttggcggctccgaaatttggagagatatagacttcgcacatgaggccccggcatttctgccttggcatcgtctcttccttcttcggtgggaacaggaaatccagaaattaaccggggacgaaaactttaccatcccctactgggattggcgagatgcagaaaaatgtgacatctgcactgacgaatatatggggggacaacaccccactaaccccaacttgttaagcccagccagctttttcagttcttggcaaatcgtctgttctaggctggaagaatataactcacatcagtcgctatgtaatggtacccctgaaggtcctcttcgccggaatccggggaatcacgataaatccaggactccccgtttgccgtcgtcagccgacgtggagttttgcctttccctcacgcagtatgagtcgggctctatggataaagcagctaacttctctttccgcaacaccctggagggtttcgcatcccccctcactggtatagctgacgcatctcagtcaagtatgcacaacgcgctgcatatttatatgaacggaacaatgagccaggtgcaaggatctgcaaacgatccaatttttttgctgcatcacgcattcgtggactccatcttcgagcagtggttacgccggcaccgtcctctgcaagaagtttatccagaggcaaacgcccccattggccacaacagggaatcctacatggtgccttttatcccgttgtatcgaaacggcgatttttttatttcctcaaaagacctgggctacgattacagctacctccaggatagcgacccagattcgtttcaagactacattaaatcctacctggagcaggcgtcacgtatctggtcttggctgttgggagcggccatggtgggtgcggttctcaccgccctactggccggtcttgtgagcctcctgtgtagacataagaggaaacaactccccgaggagaaacagccacttcttatggaaaaggaagactatcacagcctctaccagtcacacctg

SEQ ID NO: 20550 - DNA, 1587 bp, synthetic construct
  misc_feature 1..1587: note = source = /note="Description of Artificial Sequence: Synthetic coding sequence"
  source 1..1587: mol_type = other DNA
atgctgctcgctgtattgtattgcttgctctggtcattccagacatctgcaggtcactttcctcgcgcctgtgtctcctctaagaatctgatggaaaaggagtgttgccctccctggtccggcgataggagcccctgcggccaactttccggtagaggctcctgccagaacattctgctctcaaacgctcccctgggaccacagttccctttcaccggcgtcgatgatagggaaagttggccatccgtcttctacaaccgcacttgtcagtgttctggaaatttcatgggattcaattgcggcaactgcaagttcggtttctggggtccgaactgcactgagcgccgccttttggttcgcaggaatatcttcgatcttagtgcccctgaaaaggacaaattcttcgcttacctgacattggcgaagcacactatttcttctgattacgttatccccattggcacttacggccagatgaaaaatggatcaacacctatgttcaacgacatcaacatatatgacttgtttgtttggatgcactactatgtctccatggacgccctgctgggtggatcagaaatctggagggatatcgacttcgcgcacgaagccccggccttcctcccatggcacaggctgtttctgcttcgctgggaacaggaaatccagaagcttacaggtgatgaaaatttcacaattccatactgggactggagggacgctgaaaaatgcgacatctgtacagacgagtatatgggaggccagcatccaaccaacccaaatcttctctcaccagcctcttttttctccagttggcagatcgtttgcagtaggcttgaagagtacaactctcatcagtctctgtgcaatggtacacccgaaggccccctgagacgcaaccctggaaaccacgacaaaagtaggaccccaagactgccctcttctgctgacgtcgagttctgtctgtctctcacccagtatgagagcggctctatggacaaggcggcaaacttcagtttccgcaatacgctggagggttttgccagtcctttgaccggtatagcggatgcttctcaaagtagcatgcataatgctctgcacatatacatgaacggcactatgagccaggtgcaaggcagtgctaacgatccgatctttctgctgcatcacgccttcgttgattcaatcttcgagcaatggttgcgcaggcaccgccccctccaggaggtgtaccctgaagcaaacgcgccaattggtcataacagagaatcatatatggttccattcatacctttgtacaggaacggcgacttcttcatttcaagcaaagatctgggctatgactactcttatctccaggacagtgacccagactctttccaggactacatcaaatcatacctggagcaggctagcagaatttggagctggttgctgggagccgccatggttggcgccgtgctgacagcactcctggccggcctcgtaagtctcctctgtagacacaagcgcaaacagttgccagaagagaaacagccactgctgatggagaaagaagactaccattccctctaccaaagccacctg

SEQ ID NO: 20551 - DNA, 1587 bp, synthetic construct
  misc_feature 1..1587: note = source = /note="Description of Artificial Sequence: Synthetic coding sequence"
  source 1..1587: mol_type = other DNA
atgctcctggcggtgctctactgtctgctttggtcgttccagacttccgcgggacactttccgcgggcttgcgtttcgtctaagaatctgatggagaaggaatgctgtccgccgtggagcggtgaccgctccccgtgtggccagctgtcgggtagaggaagctgccagaacattctgttgagcaacgctccgcttggaccgcaattccctttcacgggtgtcgatgacagggaatcatggcctagcgtgttctataatcggacctgccagtgctcgggtaatttcatgggcttcaactgtggtaactgcaagttcggattttggggaccaaactgtactgaaagacggctccttgtccggcgcaatatcttcgatctctctgcccccgaaaaagacaagttcttcgcttaccttacccttgccaagcatactatatcttctgattacgtcattcctatcggaacgtacggacagatgaagaacgggagcaccccaatgtttaacgatatcaacatttatgatctgttcgtgtggatgcactactacgtgtcgatggacgcgctgctcggcggctcggaaatctggagagatattgacttcgcccacgaagcgccggcttttctcccatggcaccgcttgtttcttctgcgctgggaacaggaaatccaaaagctgaccggggatgagaacttcactatcccatactgggactggagagatgccgagaaatgcgatatctgcaccgacgagtacatgggcgggcagcatccaactaacccgaatcttctctccccggccagcttcttcagctcctggcagatcgtgtgcagccggcttgaggagtacaacagccaccagtccctctgcaacgggacccctgagggtccgctgaggaggaatcccggaaaccatgataagagtaggaccccccgcctgcccagttcggccgacgttgaattctgtctgtcgctgactcagtacgaatcaggaagcatggataaagcggccaacttttcattcaggaacaccctcgagggcttcgcgtcgccactcactggaatcgcagacgcctcccaatcttctatgcataacgcattgcacatttacatgaatggaaccatgagccaagtccaagggtcagccaatgacccaatcttcctgctgcatcacgccttcgtggactctatcttcgaacagtggcttagacggcatagaccactgcaggaggtctaccccgaagctaatgccccgatcgggcacaatcgcgagtcatacatggtcccttttatccctttgtaccgcaacggtgactttttcatcagctctaaggacctgggctacgactattcctacctgcaggactcggatccggattcgtttcaagactacatcaaaagctacttggaacaagcatcgcggatctggtcatggctgctgggagcagcaatggtgggagcggtgctgactgctctgttggccggactcgtgtcactcctctgtcgccacaaacggaagcaactgccagaggaaaagcagccattgctgatggaaaaagaggactaccactccctctaccagtcacatctg

SEQ ID NO: 20552 - DNA, 1587 bp, synthetic construct
  misc_feature 1..1587: note = source = /note="Description of Artificial Sequence: Synthetic coding sequence"
  source 1..1587: mol_type = other DNA
atgctgctggcagtcctctactgtctgctgtggtctttccagacaagcgccggtcacttccctagagcttgcgtgtcttcgaagaacctcatggaaaaggaatgttgccccccatggagtggcgatcgcagcccgtgcgggcagctgtctggacggggtagttgtcagaatatcctcctgagcaatgcaccgctcgggccccagttcccttttaccggcgtggacgatagggagtcctggccatccgtgttctacaataggacctgccagtgcagcggaaactttatgggtttcaactgtgggaattgtaagtttggcttctgggggcccaactgcaccgaacgacgtttgttggtgcggcgcaatatattcgacctgagcgcgcccgagaaagacaagtttttcgcctacttgaccttagctaagcacaccatctccagcgattatgtaatcccaattggtacatacggacaaatgaagaatggctcaacgccgatgtttaacgatattaatatctatgacctctttgtatggatgcattattacgtatcaatggacgccctcttgggcggctccgagatctggagagatattgatttcgcccatgaggcccctgcctttctaccctggcataggctgtttctgcttcgctgggaacaggagattcagaaactcactggggatgaaaattttaccataccttactgggactggagggatgctgaaaagtgcgacatctgcacggatgaatacatgggcggccaacatcccacaaaccctaacttgctctctccagcatccttcttctctagttggcaaatcgtttgctctcggctcgaggaatacaattctcaccagtctttgtgcaatggaactcctgagggccctctgcgcagaaatcccggcaaccatgataagtccaggacgcccagacttccctcctctgccgacgtggagttttgtctgagcctgactcagtatgagagcggaagtatggacaaggccgcgaatttttcattcaggaacacccttgaaggattcgccagccccttgaccggaattgctgacgcctcccagtcaagtatgcacaacgctctgcacatttacatgaacggcaccatgtcgcaggtgcagggtagcgccaatgatcccattttccttctgcatcacgcctttgtggattccattttcgaacaatggctgcgccggcaccgccctctgcaggaagtgtatcctgaagcaaacgcccccatagggcacaatcgagaatcgtacatggtgccatttatcccactgtaccgtaatggagattttttcatttccagcaaagaccttggctatgattattcgtatctccaggactcagatcccgattccttccaggactatattaagagttatctggagcaggcttctaggatctggtcatggttactgggcgccgcaatggtgggcgctgtgttgaccgctctcctcgcaggccttgtctcactgctgtgtcggcacaagcgaaagcagctacccgaggagaagcagcccctgttaatggaaaaggaggactaccactcactttatcaatcccactta

SEQ ID NO: 20553 - DNA, 1587 bp, synthetic construct
  misc_feature 1..1587: note = source = /note="Description of Artificial Sequence: Synthetic coding sequence"
  source 1..1587: mol_type = other DNA
atgttacttgctgtgctgtattgtctactgtggtctttccaaactagcgcaggccattttccgcgagcttgcgtttcgtccaaaaacctgatggaaaaggaatgttgtccgccgtggtctggcgataggtccccctgcggccagttatcgggcagaggttcctgccagaatattcttctctcaaacgccccccttggaccacaatttccgttcaccggcgtggacgacagagagtcatggccctctgtgttttacaaccgaacgtgtcagtgttcaggcaatttcatgggtttcaattgcggtaattgcaaatttggattttggggacctaactgcactgaacgcaggttgcttgtccgcagaaatatcttcgacttgtcagcacctgagaaggacaagttcttcgcctatttaaccctggccaaacataccatatcttccgattatgtcataccaattggaacgtacggacagatgaagaatgggagtacacccatgttcaatgacataaacatttatgacctttttgtgtggatgcactattatgttagcatggatgcattactggggggttctgagatctggcgtgatattgacttcgcccatgaagctcccgcctttctaccgtggcaccgactgtttctgctgaggtgggaacaggagattcagaaactgacaggcgatgagaatttcacaatcccttactgggattggagagatgcagagaagtgcgacatctgcaccgacgagtatatgggtggacagcatcctaccaacccaaatctgttgtccccagcctccttcttctcatcttggcagatcgtgtgctcgagactggaagaatataactctcatcagtccctgtgcaatggtacacctgaaggccccctccggcggaatccgggcaatcacgacaaatcgcgtactcccagactgccttcatcagccgatgtcgagttctgtttgagtctcacacagtacgagtccggatcaatggacaaagctgccaatttctcatttcgcaacacactggagggttttgccagccctctgaccgggatcgccgatgcctcacagtctagcatgcataatgcactgcacatatatatgaatggaaccatgtcgcaggtccagggcagtgcaaatgacccaatcttcttgctgcaccatgcctttgtagacagtatttttgagcagtggttgcggaggcatcggcccctgcaggaagtttaccctgaagccaacgcccctataggccacaacagagaaagctatatggttccgtttataccactctatcgaaacggtgatttctttatctcctctaaagatctggggtacgactatagttatctgcaggatagcgatccagacagtttccaggattacatcaagtcatatctcgagcaagctagtaggatttggtcttggctcctcggggcggctatggtgggcgccgtactgacagccctgctcgccggcctggtgtctctgttgtgcaggcacaaacgcaaacagttgcccgaagaaaaacaaccgcttcttatggaaaaagaggattatcattctctgtaccagagtcacctc

SEQ ID NO: 20554 - DNA, 1587 bp, synthetic construct
  misc_feature 1..1587: note = source = /note="Description of Artificial Sequence: Synthetic coding sequence"
  source 1..1587: mol_type = other DNA
atgcttcttgctgttctctattgccttctttggagctttcaaaccagcgccggtcactttcccagagcatgtgtgagctcaaaaaaccttatggaaaaagaatgttgtcccccttggtcaggagatcggtccccgtgcggacagctgtctggacggggatcgtgtcagaacatcctcctttccaatgcaccacttggacctcagttcccttttactggggtggatgatcgagaatcctggccgagcgtgttttacaacagaacttgccagtgtagcggtaacttcatggggttcaattgtgggaactgtaagtttgggttttggggaccaaactgcaccgaaagaaggctcctcgtccgtagaaacattttcgatctttccgccccagagaaggataagtttttcgcataccttacccttgcgaagcatacgatctcatctgactacgtcattcctattggaacttacggacagatgaaaaacggatcaactccaatgtttaacgacatcaacatttatgatctctttgtgtggatgcattactacgtgagcatggatgcacttctcggcgggtccgagatctggagggatatcgactttgctcatgaggcacctgctttcctcccctggcatagactgttcttgctgaggtgggaacaggaaatccaaaaactgactggtgatgagaactttaccataccatactgggattggagggatgcggagaagtgcgatatctgcacggacgagtacatgggtggccaacatcctaccaaccctaacctgctttcaccagcatcttttttctcgtcatggcaaatcgtgtgcagcaggctcgaggaatacaactcccatcaaagcctctgtaatggaaccccagaaggtcccctgcgtaggaatcctggaaaccacgacaagtcacggactcctcggcttccttcatcggccgacgtggaattttgtctctcactcactcagtacgaatcaggttcgatggataaggccgcgaatttcagcttcaggaacactcttgagggattcgcaagtccacttaccggaatagcggatgcaagccagagctcaatgcacaatgcacttcatatctacatgaacggcacgatgtcacaagtccaggggtcagctaatgatccaatcttcctgttgcatcatgcctttgtggattcgatttttgaacagtggctccggcgacatcgccctctgcaggaagtgtaccccgaagcgaatgcacccattggtcataatcgggaatcctatatggtgccattcatacccctctacagaaacggtgacttcttcatttcctccaaagacctcggctacgattacagctaccttcaagactccgatcctgattcgtttcaggattacattaagtcgtacctcgaacaagccagcagaatctggtcctggcttcttggagccgcaatggtcggtgcagtcctgactgccctgctcgctggactggtgtcattgctctgcagacacaagagaaaacagcttcctgaagagaagcagccacttcttatggagaaggaggattaccattcgctgtaccaaagccatctg

SEQ ID NO: 20555 - DNA, 1587 bp, synthetic construct
  misc_feature 1..1587: note = source = /note="Description of Artificial Sequence: Synthetic coding sequence"
  source 1..1587: mol_type = other DNA
atgcttctggctgtcctgtactgtttgctttggtcgttccaaaccagtgcagggcatttcccccgagcatgtgtttcgtcgaagaacctaatggagaaggaatgctgcccaccctggagcggggatcgatcgccgtgtggccagctatccggacgaggatcatgccagaacatactcctctccaacgctcccctcggaccgcagtttccgtttaccggcgtggacgaccgagaatcatggccgtccgtgttttataacaggacgtgccagtgttccggaaattttatggggtttaattgcggcaactgcaagtttggcttctggggaccaaactgcaccgaacggcgacttttggtccgcagaaacattttcgacctgtcagctccggaaaaagacaaattttttgcttatttaaccctcgctaagcatacaatttcatctgattacgtgattcctattggcacgtatggacaaatgaagaatggctctacacccatgtttaacgacatcaatatttacgatttgttcgtgtggatgcattactatgtttcaatggatgcactccttggtggatcggagatctggcgtgatatagatttcgcacacgaggctcctgcctttttaccgtggcatcgattgttcttacttcgctgggaacaagagatacagaagttaacgggggatgaaaattttacaataccctactgggattggagggacgccgagaaatgcgacatttgtactgatgagtacatgggtgggcagcatcccacgaatccaaacctcctttctccggccagtttcttctcctcttggcagatcgtgtgctctagactggaggagtataactcgcatcagagtctatgtaacggaacgccggagggcccacttaggcgaaacccaggaaatcatgacaagtctagaacgcctcggcttccgagctcagccgacgtcgaattctgcctgtcgctgacgcagtatgagtctggatccatggacaaggcggccaacttttctttccggaataccctcgaggggttcgcttcgccccttaccggcatcgcggacgcgagccaatcaagtatgcataatgctttgcatatttacatgaacggcaccatgagtcaagttcagggctccgccaatgatccgatattcttgttacatcatgcctttgtggattccattttcgagcagtggcttaggcgccacaggcctctacaggaagtttatcctgaggccaatgcgcctataggtcataatcgcgagtcctacatggtcccatttatacctctatacaggaatggcgattttttcatttcgagtaaggatttgggttacgactattcttacctgcaggattccgaccccgacagctttcaagattacattaaatcctatctggagcaggcgtcgcggatttggtcgtggctgctgggtgctgctatggtaggagctgtactgacagcattgctcgccggcctggtctctctgctctgccggcacaagcggaagcagctcccggaggaaaagcagccactgcttatggaaaaggaggactaccatagtctataccaaagtcacttg

SEQ ID NO: 20556 - DNA, 1587 bp, synthetic construct
  misc_feature 1..1587: note = source = /note="Description of Artificial Sequence: Synthetic coding sequence"
  source 1..1587: mol_type = other DNA
atgctgcttgcagttctgtattgtctcctgtggtcctttcagacatcagctgggcatttcccccgtgcttgtgtcagctcaaagaatctgatggagaaagagtgttgcccaccctggtctggtgatcgctctccctgcggacagttgagcggacgggggagttgtcagaatatactgttgtctaatgctcctcttgggccccagttcccctttaccggggtggacgatcgtgagtcctggcccagtgtattctacaaccgcacctgccaatgttctggtaacttcatgggctttaactgcggaaattgtaagttcggcttctgggggcctaactgcacagagcgtcgcctcctggttaggagaaacattttcgatctttccgcccccgagaaggataaattcttcgcttacttgactttagccaagcacaccatcagcagtgattacgtaatcccgatcggaacatatggacagatgaaaaatggatctaccccaatgttcaacgacatcaatatttacgacctcttcgtatggatgcactactatgtgagcatggacgccctcctcgggggatctgaaatctggagagatatcgactttgctcacgaggcccctgcatttctcccctggcacaggctgttcctccttagatgggaacaggagatccagaagttaaccggcgacgagaactttaccataccatactgggattggagggacgccgaaaagtgcgacatttgcacagatgagtacatggggggacaacaccctactaatcctaacttgctgtctccagcttccttcttttcttcctggcagatagtgtgctcaaggctggaagaatataatagccaccagtcgttatgtaatggaacccccgaggggccacttaggaggaatccgggaaatcacgataagtcacgcaccccacgactcccatcatccgcggatgtcgaattttgtctgtcattgacacagtacgagtccggatccatggacaaggccgccaacttctcatttaggaacactctcgagggatttgccagtccgctgactggaatcgcagacgcaagtcagtcatctatgcacaatgctctgcacatatacatgaacggtacgatgtcacaggtgcagggatccgcaaatgatccaattttcctgctgcaccacgcatttgtggacagtatcttcgagcagtggctgcggcgccatagacccttacaagaagtctatcctgaagctaatgcccctatcggacacaatagagagtcatatatggttccattcatccccctgtatcgcaatggggatttcttcatttctagcaaagacttaggctatgactatagctacctgcaggatagtgatccagactcgttccaggactatatcaagtcctacttggagcaggcgtctcgaatctggtcatggctgcttggcgcggctatggttggagctgtgctgactgctctgctcgccggactcgtcagtctgctgtgccgtcataagcggaaacagctgcctgaggagaaacagcccctcctgatggaaaaggaagattatcatagcctctatcagtcgcatctg

SEQ ID NO: 20557 - DNA, 1587 bp, synthetic construct
  misc_feature 1..1587: note = source = /note="Description of Artificial Sequence: Synthetic coding sequence"
  source 1..1587: mol_type = other DNA
atgcttctcgcagtgctgtactgcttactgtggtccttccaaaccagcgcaggccacttccctcgcgcgtgcgtctctagcaaaaacctgatggagaaagaatgctgtccgccttggtccggggatcggagcccgtgtggtcaactgagcggccgcgggagttgccaaaacattctgctgagcaacgcacccctgggtccccagtttcctttcacaggggtagatgatcgggagagttggccaagcgtgttctataatagaacctgtcagtgctccggcaacttcatggggttcaattgtggcaactgtaagttcggtttctggggccctaattgcactgagcgccgtctgctggtgcgtagaaacatcttcgatctgtcggcgccggagaaagacaaattctttgcctatctcaccctggcgaagcacactattagcagcgattacgttatccctatcgggacctacggccagatgaaaaatggaagcacgccaatgtttaatgatatcaacatctatgatctgttcgtatggatgcactattacgtgagcatggacgctctgctgggcggctcagaaatttggcgagacattgacttcgcgcacgaagctccagccttcctgccgtggcatcgtctgtttctactgcgctgggaacaggaaatccagaagctcactggtgatgagaatttcaccattccatactgggactggcgtgatgcggagaaatgcgacatctgcactgatgagtatatgggcgggcagcaccctactaatcctaatctgctgtcaccagcaagcttcttcagctcttggcagattgtctgcagccgcctggaggagtataattctcatcagagcctgtgcaatggaaccccagaaggaccactgcgccgtaacccgggtaaccacgataagtctcgcaccccaagactgccatcaagcgccgacgtggaattctgtctgtccctcactcaatatgagtctggtagcatggataaggctgcaaatttttctttccgtaatacccttgaaggctttgcaagccctctgactggtatcgcagatgccagccaatcatctatgcacaacgctttgcacatatacatgaatggtaccatgagccaggttcagggctcagcaaatgaccctatctttctgctgcaccatgcctttgtcgattcaatattcgagcaatggttgaggcgtcatcgcccactgcaggaagtttatccggaggctaatgcaccgataggccacaaccgcgagtcttacatggttccatttattcccctttatcggaatggggatttcttcattagtagcaaagacttgggttatgactattcgtacctgcaggattccgaccctgatagcttccaagattacattaagagctacctcgaacaggcttcccgcatttggtcgtggctgttgggtgccgcaatggtaggggccgtgctgaccgcactgctggctggcttggtttctctgctgtgtcgtcataaacgcaagcagctgccagaggagaagcagccactcctgatggaaaaagaggattaccatagcctctaccagagccacctt

SEQ ID NO: 20558 - DNA, 1587 bp, synthetic construct
  misc_feature 1..1587: note = source = /note="Description of Artificial Sequence: Synthetic coding sequence"
  source 1..1587: mol_type = other DNA
atgctcctggccgttctctactgcctgctctggagctttcaaacttcagccggccatttccctcgagcatgtgtctcatccaagaatctcatggaaaaggaatgctgcccgccgtggtcgggtgacaggagcccatgtggccagctgtccggacgggggtcatgccaaaacatccttctgtccaacgccccactcgggcctcaattcccattcaccggagtggacgatagagaatcatggccgagcgtgttctacaaccgcacttgccagtgctcaggaaatttcatgggcttcaactgtggaaattgcaaatttggattctggggcccgaactgcactgaaaggcgactgctcgtccgccgcaatatctttgacttgtcggctccggaaaaagataagttcttcgcctacctcaccctggccaaacacactatctcttcagactacgtgatcccaattggaacctacggtcagatgaaaaacggatcaactccgatgttcaacgacatcaacatatatgatctgttcgtgtggatgcattactacgtgtcgatggacgccctccttggtggttcggaaatctggagggatatcgatttcgcacacgaggccccagctttcttgccgtggcaccgcctgttcctcctcagatgggagcaggaaatccaaaaacttaccggcgatgaaaacttcaccattccttactgggactggcgcgacgctgagaagtgcgatatttgcacggacgaatacatgggaggacagcatcctaccaatccgaacctgctgtcacctgccagcttcttctccagctggcagatcgtgtgtagccgcctcgaggagtacaactcacaccagtccctgtgcaatggaacgccggaagggccgctgaggcgcaacccaggaaatcacgataaatcccggacgccgcggctcccgagctcagcggatgtggagttttgcctgtcgttgactcagtacgaatctgggtcgatggataaagcggcaaacttttccttccgcaatactctggaaggattcgcctcccccttgacgggcatcgcggacgcctcgcagtcctcaatgcataatgctctgcacatctacatgaatggtactatgtcccaggttcaagggagcgccaatgacccgattttcctgctccaccacgccttcgtggatagcatttttgagcaatggctgcgccggcaccggcctcttcaggaagtctacccagaggccaatgcccccatcggccataacagggaatcgtatatggtcccatttatccctctgtaccggaacggagatttcttcatcagttccaaagatctgggatacgattacagctacctgcaggatagcgaccccgactcgttccaggactacatcaagtcctacctcgaacaggcaagcaggatctggtcgtggctgctgggagcagcgatggtgggcgcagtcctgactgcccttttggcaggcctggtcagcttgctgtgtcgacataaacggaagcagctgccagaggaaaagcagccgctgctgatggagaaagaggactaccatagcctgtatcagagccatttg

SEQ ID NO: 20559 - DNA, 1587 bp, synthetic construct
  misc_feature 1..1587: note = source = /note="Description of Artificial Sequence: Synthetic coding sequence"
  source 1..1587: mol_type = other DNA
atgcttttagctgtgttgtactgtttattgtggtcattccagacgtccgccgggcacttcccccgagcttgcgtgtctagtaagaacctgatggaaaaggaatgctgtcccccatggagtggtgatagatccccgtgtggacagctctcgggcaggggctcatgccagaacattctcctgagcaacgctccgctcggaccacagtttccattcacgggcgtggatgatcgagagtcttggcctagcgtgttctacaatagaacttgtcagtgcagcggcaacttcatggggtttaactgtggtaattgtaaattcggcttctgggggcccaattgtactgaaagaagactgctcgttaggaggaatatcttcgacctgagcgctccagagaaggataaattctttgcctacttaacattggctaagcacacaattagtagcgattatgtgattcctattggcacctatggccagatgaagaacggctctacaccaatgttcaacgatatcaatatctatgatctgttcgtgtggatgcattactacgtgtcaatggacgccttattgggcgggagcgagatatggcgggacatcgactttgcacacgaggctcccgcgttcctgccatggcaccggctattcctcctgaggtgggaacaggaaatccaaaaactgacaggcgacgagaacttcaccataccatactgggactggcgcgatgctgaaaagtgcgatatttgtacagacgagtacatgggcggacaacacccaactaatccgaatctgttaagccccgcaagttttttcagcagttggcagatcgtgtgctccagactggaggagtataacagccatcaaagcctgtgcaacgggaccccggagggcccattgcgccgcaatccaggcaaccacgataagtcccgcacaccccggctcccttcctccgcagatgtggagttctgcctgagcctcacccagtatgagagcggtagcatggacaaggcggctaattttagcttcaggaacactcttgagggatttgcttcacctcttactggaattgcagatgcaagccagagctccatgcacaatgcgttacatatttacatgaacgggaccatgtcgcaggttcagggatccgctaacgatccgatcttcctgctgcaccacgccttcgtggattctatctttgagcagtggctacgcagacatcgcccacttcaggaagtgtatcccgaggccaacgccccaatcggtcacaaccgcgagagctatatggtgcccttcatccccttatatcgcaatggagactttttcataagttccaaggacttgggttacgattatagctatcttcaagacagtgacccagactctttccaggactacattaaatcctaccttgagcaggcgagtaggatctggtcgtggttgctgggcgccgcaatggtgggggcagtgttgaccgcgttactggctggcctggtttccttgctctgccgtcataaaaggaagcagctacccgaagagaagcagccactgttgatggaaaaagaggactatcactccttatatcaatctcatttg

SEQ ID NO: 20560 - DNA, 1587 bp, synthetic construct
  misc_feature 1..1587: note = source = /note="Description of Artificial Sequence: Synthetic coding sequence"
  source 1..1587: mol_type = other DNA
atgttactggccgtcctttactgtttgctatggtccttccagactagcgctggacattttcctagagcttgtgtctcatcaaaaaacctgatggaaaaagagtgttgccccccttggtcaggggatcggagcccttgcggccagctgtctgggcgcggcagttgccagaatattttgctttccaatgctccactgggcccacaatttccattcacgggcgtggacgaccgcgagagctggcccagcgtcttctataatcgaacttgtcagtgctccggtaattttatggggttcaactgcgggaattgcaaattcggattctggggccctaactgcaccgagcgccgtcttctcgtccgtcgcaacattttcgatctcagcgcacccgagaaggacaagttctttgcatatctgacattggctaagcacactatctctagcgactacgttatccccatcggtacctacggacagatgaagaacggttcaacgcccatgtttaacgatattaacatctatgaccttttcgtgtggatgcattactacgtctccatggatgcgttactgggaggatctgaaatttggcgggacatagatttcgcacatgaagccccggcgtttctcccatggcacaggctgtttctattgaggtgggaacaagagatccaaaagttaacaggagatgagaattttacaattccctattgggattggagggatgccgagaagtgcgacatctgtactgacgaatatatgggtgggcaacaccccacaaaccctaacttactatcccccgcctctttctttagtagttggcagatcgtgtgctcgcggttagaggaatacaactctcatcagagtttatgcaacggcacacctgaggggcccctgaggcgaaatccagggaatcacgataagtctagaacaccgcgactaccgtccagcgcagacgttgagttttgtctgtcactgacacagtatgagagtggttccatggacaaggctgcaaattttagctttcgtaacacccttgaggggtttgcctcccctctcacaggtatcgctgatgccagccagtctagtatgcacaatgctctgcatatttacatgaacggcaccatgtctcaagtgcagggctccgccaatgacccaatattcctgctgcaccatgctttcgtggattccattttcgaacagtggttaagacgtcacaggcccctgcaggaagtttaccccgaagccaatgcgcctattggccacaatcgcgagtcctatatggttcccttcatcccactatatagaaacggtgactttttcatttcctctaaagatctcggctacgattattcttacctgcaagattctgaccccgattccttccaggactacattaagtcatatctcgaacaggccagccggatctggagctggctgttgggggctgcaatggtcggggcagtgctgacagctcttcttgccggccttgtgtcgctgctgtgtcggcacaagagaaagcagctcccggaagaaaaacagccactccttatggaaaaagaggattaccacagcctgtaccagtctcacttg

SEQ ID NO: 20561 - DNA, 1587 bp, synthetic construct
  misc_feature 1..1587: note = source = /note="Description of Artificial Sequence: Synthetic coding sequence"
  source 1..1587: mol_type = other DNA
atgctgttggccgtgctgtattgtctgctatggtcatttcagacatcagcaggtcattttcctcgggcgtgcgtaagctctaagaatctgatggaaaaagagtgctgcccaccatggtccggggatcgaagcccatgtggccaactatctggaagagggagctgtcagaacatcctgttatctaatgcccccctgggacctcaattccccttcactggagtggatgaccgggagagctggccgtctgtgttctataaccgaacctgtcagtgtagcggcaatttcatgggctttaactgcggcaactgcaaatttgggttctggggtccaaactgtactgaaagaaggctgctggttaggagaaatatctttgatcttagcgcacctgagaaggataaattcttcgcatatttgacactcgccaagcatacaatctctagcgattacgttatccccatcggcacttatggacagatgaaaaatgggtcgacccccatgttcaacgatatcaatatttatgacctcttcgtgtggatgcattactacgtttccatggatgctttactggggggttcagagatctggagagatattgattttgctcatgaagccccagcctttctgccttggcacaggctctttctcctaagatgggaacaggagatccaaaaactgactggagatgaaaacttcacaattccatattgggactggagggatgcagagaaatgtgatatttgcacggatgaatacatgggcggccagcatcccactaaccccaatctgctgtcaccggctagctttttctcatcatggcagatcgtgtgctcccgcctggaagagtacaactctcatcagagtctgtgtaacgggacacctgagggcccccttagaaggaaccccggcaatcacgacaaatctcgaactccccggctccccagttctgccgacgtggaattttgccttagcctgacccagtacgaaagcgggtcaatggacaaagcggcaaacttttcatttcgaaacacactggagggatttgccagtcccctgaccgggatcgccgacgcaagccagagttcgatgcataatgctctgcatatttacatgaatggtactatgtcccaggttcaaggcagcgcgaacgaccctatttttctgctacatcatgctttcgtggactccatcttcgaacagtggcttcgcagacacaggccacttcaggaggtataccccgaagccaacgcccctatagggcataatagggaatcctatatggttccatttatcccgttgtacagaaatggcgattttttcatctcctccaaggatctgggctatgattactcctaccttcaggatagcgatcccgacagttttcaggattatattaagtcctacctagaacaggcttcgagaatctggtcctggctactcggtgctgccatggtcggtgcagtgcttactgcattgcttgcggggttggtctcactactttgtagacacaagaggaagcaactgccagaagaaaagcaacccctccttatggagaaggaggattaccacagcctttatcagtcccatctc

SEQ ID NO: 20562 - DNA, 1587 bp, synthetic construct
  misc_feature 1..1587: note = source = /note="Description of Artificial Sequence: Synthetic coding sequence"
  source 1..1587: mol_type = other DNA
atgctcctagccgtactgtattgtctcctctggtcctttcagacttcagcgggacactttcctcgggcctgcgtatctagtaaaaacctcatggaaaaggaatgctgtcccccttggtccggggaccgctcaccctgcgggcagttgtctgggcggggaagttgccagaatatattactgtctaatgcaccccttgggccccaattcccgttcactggagtcgatgatcgggagtcctggccaagtgtgttctataaccgcacttgtcagtgtagtgggaactttatggggtttaattgtgggaattgcaaattcggattctggggacccaactgcacagagcggcggctgctcgtcagaagaaacatattcgatctctctgccccagagaaagataaattcttcgcttacctgacattagctaaacatactatctcatctgattatgtgatcccaatagggacatacgggcagatgaaaaacgggtctactccaatgtttaatgatataaatatttatgatttgtttgtgtggatgcactattatgtgtccatggatgcactattgggaggaagtgaaatctggagggatatagattttgcacatgaagcaccagccttcttaccttggcatagactatttttgttacgatgggaacaggaaatacagaaacttacaggggatgaaaatttcacaatcccttattgggattggagggatgccgaaaaatgtgacatatgcacagatgaatatatggggggacagcatcccacaaatcctaacctcctctcccccgcttctttcttctcttcctggcagatcgtgtgctccaggctcgaagagtacaattcccatcagtcactctgtaatgggactcccgaagggcctcttagacggaatccagggaatcacgataaatcacgaactcccagactaccttcgtctgcagatgtcgaattctgcctttcactaacacagtacgagagtgggtcaatggataaggctgctaatttctcttttcgaaatacattggaagggttcgcatccccattaacagggatcgccgatgcctcacagtcttccatgcacaacgccttacatatatatatgaacgggacaatgtcccaggtgcaggggtcagctaatgatcctatatttctgctacatcacgcttttgtggattccatcttcgaacaatggctccgtcggcatcggccactccaggaggtctatcccgaagccaacgcccctataggacacaatagggaaagttatatggttcccttcatccccctgtacagaaacggagatttttttatttcttcaaaagatctaggatacgattattcctatcttcaggattccgaccccgatagttttcaggattatataaaatcttatctcgaacaagcatcacgaatctggtcatggctactgggggctgcaatggttggagcagttctgactgctctgctggccgggctagtctctttgttatgccgacataaaaggaaacagctgcctgaagaaaaacagcccctcttgatggagaaagaagattatcactctctctatcaatcccatctc

SEQ ID NO: 20563 - DNA, 1587 bp, synthetic construct
  misc_feature 1..1587: note = source = /note="Description of Artificial Sequence: Synthetic coding sequence"
  source 1..1587: mol_type = other DNA
atgctgcttgccgtcttgtactgtctgctgtggtcctttcaaacgtccgcaggccactttcctagagcatgtgtgtcgtcgaaaaacctgatggaaaaagagtgttgtccaccctggtccggggacaggagcccttgtgggcaactgtcgggtcgggggtcctgccaaaacattctgcttagcaacgcaccactggggcctcagtttccctttacgggcgtggatgaccgggaatcgtggccgagcgtcttttacaacaggacctgccagtgctccggcaacttcatgggattcaactgtggaaactgtaaattcggattctggggacccaattgtactgaacgcaggctcctggtaagacggaatatcttcgacctgtcggctcccgagaaggataagtttttcgcatacctcaccttggcaaagcatactatttctagcgactacgtgatcccgattggcacttacggacagatgaagaatggatcaactcccatgtttaacgatatcaacatctacgatctttttgtctggatgcactactacgtcagtatggatgcgttgctcggtggatcagaaatttggagggatatagattttgcacatgaagcgcccgcattccttccctggcatagactgtttctgttgaggtgggagcaggaaattcaaaaacttaccggtgatgaaaactttaccataccttactgggactggagagacgcagaaaagtgcgatatctgtacggatgagtacatgggcggccagcatcctactaatcctaaccttctgtcacctgctagctttttcagctcgtggcagatagtgtgttcaagactcgaagaatacaatagtcatcaatcgctttgtaatggaacccctgagggaccgctgcgaagaaatccaggaaatcatgataagagccgtaccccccgcctgccgtcctccgcggacgtcgagttctgtctgtcacttactcaatacgagtcaggttctatggacaaggccgccaacttttcatttagaaacactcttgaaggattcgcatctcccctgactggtattgcggacgcatcgcaatcgagcatgcataatgctctccacatttacatgaacggtaccatgagccaagtgcagggttccgctaacgaccccatctttctgctgcaccatgcgtttgtggattccatttttgagcagtggctgaggagacaccgccctttgcaggaggtgtaccctgaagccaacgcacccattggacataaccgtgaatcatatatggtgccgtttattcccctttaccgaaacggtgatttcttcatatcttcaaaagaccttggatatgactattcgtacctgcaagacagcgatccggatagcttccaggactacatcaaatcgtaccttgagcaagcctcacgcatttggtcgtggctcctcggagccgcgatggtgggtgcagtgcttaccgcactgcttgcagggttggtgtccttgctttgcagacataagcggaaacagctgcctgaagaaaaacagccactcttgatggagaaggaagattaccattccctctaccaatcccacttg

SEQ ID NO: 20564 - DNA, 1587 bp, synthetic construct
  misc_feature 1..1587: note = source = /note="Description of Artificial Sequence: Synthetic coding sequence"
  source 1..1587: mol_type = other DNA
atgttgttagctgtcctctactgtctgctttggtcattccagaccagcgcaggtcacttcccgcgggcctgtgtctcaagtaagaatcttatggaaaaggaatgctgccctccgtggagtggagatcgctctccttgcggacagctgtccggccgaggatcgtgtcaaaacatcttacttagtaatgctcccctcggaccgcaatttccgtttacaggcgtcgacgatagagagtcttggccatcagttttctataaccggacctgccagtgttcggggaactttatgggatttaattgcggaaattgtaaattcgggttctggggtcccaactgcaccgaacgaaggcttcttgtaaggcgtaacattttcgatctgagcgcccctgagaaagacaagttcttcgcatatctgacccttgctaagcacactatatcatcagattatgtgatcccaattgggacctatggtcagatgaagaatggcagtacgcctatgtttaacgatattaatatttatgatttgtttgtatggatgcattattatgtgtccatggacgccttgcttggtggctctgaaatctggcgtgatattgactttgctcatgaagcaccagctttcctcccatggcatcgtctgtttctgcttagatgggaacaggaaattcagaaactcactggtgacgaaaattttactataccgtattgggactggcgagacgctgaaaagtgcgacatttgtacagatgaatacatgggtggtcaacatcctacgaaccccaacctgttgtcccctgcctcttttttttctagttggcaaatcgtatgcagtaggcttgaggagtacaactcccatcaatcactctgtaacggtacgcctgaaggtccactcagacgtaaccccggaaaccatgataagtctagaacccccagactaccttcaagtgctgatgtggaattttgtttgtcacttacgcaatatgagtctgggagtatggataaagcagctaatttttcttttaggaacacgttggaaggctttgctagtcccctcaccggtatagcagatgcttcacaatcctctatgcataatgctcttcacatatacatgaacggaaccatgtcccaagtacaagggtctgctaacgatccaatttttttgcttcaccatgcattcgtcgatagcattttcgaacaatggttgagacggcatagaccgcttcaagaggtctacccggaggcaaacgcaccaattggtcacaaccgggagagctatatggtcccatttatcccactctaccgaaacggtgatttttttataagttccaaggacctggggtatgattattcttatcttcaggatagtgatcctgactcgttccaagattatattaaaagctaccttgaacaggccagtcgtatatggtcttggctgttaggagctgctatggttggggcagtgcttacagcgttacttgcaggtctcgtgtccttgctgtgccgacacaagcgaaagcagctcccagaggagaaacagcctctgttgatggagaaagaagattatcattcactatatcagtctcatttg

SEQ ID NO: 20565 - DNA, 1587 bp, synthetic construct
  misc_feature 1..1587: note = source = /note="Description of Artificial Sequence: Synthetic coding sequence"
  source 1..1587: mol_type = other DNA
atgctcttggccgttttgtactgcctcctgtggtccttccagacctcggcgggccacttcccacgggcgtgtgtctcctcgaagaacctgatggagaaagaatgctgtccgccgtggtcgggtgatcgctcgccttgcggccagctctcgggtcggggaagttgtcaaaacattctgctgtcaaatgccccgttgggaccgcagtttccgttcaccggagtggacgatcgggaatcgtggccatcggtgttctacaatcgaacttgccaatgttccgggaatttcatgggctttaactgtggaaattgcaagttcggattctggggcccaaactgtacggaacgccggctcctcgtcaggcgcaatatcttcgatctttcagcgccggaaaaggacaagttcttcgcttacctgacgctggcaaagcacactatctcctccgactacgtaatcccgattggcacttacgggcagatgaagaacggctcgacgccgatgtttaatgacatcaacatctacgatctcttcgtgtggatgcattactatgtgtcaatggacgctcttctggggggctccgaaatctggcgtgacatcgacttcgctcatgaggctccggcgttcctcccttggcaccggctctttttgctgcggtgggaacaggagatccaaaaactgaccggtgacgagaatttcaccatcccatactgggactggagggacgccgaaaagtgcgatatttgtaccgacgagtatatgggtggacagcacccgactaacccgaatctgttgagccccgcctcgttcttctcatcctggcagattgtctgctcgcggctggaagagtataactcccatcaaagcctctgcaatggcaccccggagggcccgctcagaagaaatccaggaaatcatgacaaatcacggaccccgcggctgccgtcatcggccgacgtcgagttctgtcttagcctgactcagtacgagagcggttcgatggacaaggctgcgaacttttccttcagaaacaccctggaaggattcgcgagccctctgactggaatcgcagacgcctcccaatcaagcatgcacaatgcgctgcacatttacatgaacggaactatgtcgcaggtgcagggatcagccaatgacccgattttcctgttgcaccatgcgtttgtggattccatctttgagcagtggctcagaaggcaccggccactccaagaggtgtaccccgaagcgaacgcgccgatcggacataaccgcgaatcgtacatggtgccgtttattccactctaccggaacggtgatttctttatctcgtcaaaagatcttggttacgattacagctacctgcaggactccgatccggactcctttcaggattacatcaagagctaccttgaacaagcatcgaggatctggtcgtggctgctcggcgctgccatggtgggagccgtgctgaccgccctgctcgcaggactcgtgtcactgctctgccgccacaagaggaagcagctcccagaagaaaaacagccgctgttgatggaaaaagaagattaccactccctctaccaatcgcacttg

SEQ ID NO: 20566 - DNA, 1587 bp, synthetic construct
  misc_feature 1..1587: note = source = /note="Description of Artificial Sequence: Synthetic coding sequence"
  source 1..1587: mol_type = other DNA
atgcttttggcggttctgtactgtttgctttggtcattccagactagcgccggccactttccgagagcctgcgtgagctcaaagaacctgatggaaaaggaatgttgccccccgtggtcgggggacagaagcccatgtggacagctgtcgggtagaggcagctgccaaaacatcctgctgtcaaacgccccgctcgggccgcagttccccttcaccggcgttgatgacagagaaagctggcctagcgtcttttacaaccggacttgccagtgctccggcaactttatgggattcaactgcggaaactgcaagttcggtttctggggtccgaattgcactgaacggcggctgctcgttagacggaacatcttcgacctgagcgcgccggagaaggataagtttttcgcgtaccttactctggctaagcacaccatctcctctgattacgtgattcctatcggaacttacgggcaaatgaagaacggatcaaccccaatgttcaacgatatcaacatctacgatctcttcgtctggatgcactactatgtctcgatggatgcactgctcggaggctctgaaatctggagagatatcgactttgcacatgaggcccctgcgttcctcccatggcaccgattgttcctgctgcgatgggaacaagagatccaaaagctgaccggggacgagaacttcaccattccgtactgggattggcgcgacgcagagaaatgcgacatctgtaccgatgaatacatggggggtcagcaccctacgaacccgaacctcctctcaccggcatccttcttttcgtcgtggcaaattgtgtgctcaagactggaagaatacaattctcatcagtccctgtgcaacggtaccccggaaggccccctccggagaaaccctggaaaccatgataagtctcgtaccccccggctcccatcatccgctgacgtggaattttgcctgagcctgactcagtacgagtcagggtctatggacaaagccgccaacttttcctttcggaatactctggagggattcgcctcgccgctgaccggtattgcagacgcttcccagtcgagcatgcataatgccctgcacatctacatgaatggaactatgtcccaagtgcagggatccgctaacgatcccatctttctgctccatcacgccttcgtcgactcgatcttcgaacaatggctgaggcgccatagaccgctgcaagaagtctacccggaggcaaatgcgccgatcggtcacaatcgcgaaagctacatggtgcctttcatcccattgtaccggaacggcgatttcttcatctcttccaaggacctgggatacgattactcatacctgcaagacagcgaccctgacagcttccaggattacatcaagtcgtacctcgaacaggcgtcgcgcatctggagctggctgctgggagcggcaatggtcggggccgttctcaccgcattgttggctggactcgtctcgctcctgtgccgccacaaacgcaaacagctgccagaggaaaaacagccacttctgatggagaaggaggactatcactcactgtaccagtcacacctg

SEQ ID NO: 20567 - DNA, 1587 bp, synthetic construct
  misc_feature 1..1587: note = source = /note="Description of Artificial Sequence: Synthetic coding sequence"
  source 1..1587: mol_type = other DNA
atgctcctggcagtcctttattgcctgctgtggtcctttcagacgtccgcgggtcacttcccccgcgcctgcgtttcttccaagaatctgatggagaaagagtgctgtcccccctggagcggggacagatctccctgcggacagctttccgggagagggtcgtgccaaaacatcctcctctccaacgctcctctaggcccccagttccctttcactggggtggatgacagagagtcttggcctagcgtgttttataacagaacttgtcagtgctccggtaacttcatgggattcaattgcggcaactgtaaattcggcttttggggtccaaactgcaccgagcgccgcctcttagtgcggcgaaatatctttgacctaagtgcccccgaaaaggacaaatttttcgcctacctgactttggccaagcatactatctcatctgactacgttattcctatcggaacctacggccagatgaaaaatgggagtaccccgatgtttaatgacattaacatttatgatttgtttgtttggatgcattattacgtgtccatggacgctctcctgggaggaagtgagatttggcgcgatattgatttcgcccatgaggcgcctgcattcctcccctggcataggctgtttcttctgcgctgggagcaggagatacaaaaattaaccggcgatgagaactttaccatcccttattgggactggcgcgacgcagaaaaatgcgacatttgtacagacgagtatatgggaggccagcatccaacaaatccgaacctcctcagccccgctagcttcttcagttcctggcaaatagtgtgctcgcgtctcgaagagtacaatagccaccaatcactgtgtaacggaacacccgaagggcccctgaggcggaaccccgggaaccacgacaagagccgaactccccggcttccatcttccgctgacgtggaattttgcctgtctctgactcaatacgaatcaggctcaatggacaaagccgccaacttcagcttccggaataccctggagggattcgcaagtccactgaccggcatcgctgatgcgtctcagtcaagtatgcataatgcactgcatatctacatgaacggaaccatgtcccaggtgcaagggagcgcaaatgatcctatatttctgctccatcacgctttcgttgatagcattttcgagcagtggctcagacgacacaggcccctccaagaagtgtaccctgaggctaatgcccccatcggccataaccgtgagagctatatggtgcctttcattccattgtatagaaatggggatttcttcatctctagcaaggatctaggatatgactactcttatctccaagactccgatcccgactcctttcaggactacatcaagagctaccttgaacaagcatcgaggatctggtcttggctgctgggggcagcaatggtgggcgccgtccttacagcattactggccggactagtgtccctgctttgtcggcataagcggaagcagcttcccgaggaaaaacagcccttacttatggagaaggaggattatcactctctctaccagtcccacttg

SEQ ID NO: 20568 - DNA, 1587 bp, synthetic construct
  misc_feature 1..1587: note = source = /note="Description of Artificial Sequence: Synthetic coding sequence"
  source 1..1587: mol_type = other DNA
atgttactcgccgttctgtactgcctgctctggtcctttcaaacatcagctggacacttccctcgggcctgtgtgagttcaaagaatctcatggagaaggaatgctgccctccgtggtctggagatagatccccttgcgggcagctgtcagggcgggggtcctgccagaatatcctgctgtccaacgccccactgggaccacagttcccatttactggtgtcgacgatcgtgaatcctggccttctgtgttctataaccgcacctgtcagtgtagcggaaacttcatgggattcaactgcggcaattgcaaatttgggttttgggggccgaattgcactgagcggagactgcttgtccgccgaaacattttcgacctgagcgctcccgaaaaagacaagttcttcgcctacttgactttggccaagcacacaattagctccgattacgtaatacccatcggaacctacggccagatgaagaatgggtctacacctatgttcaacgatatcaacatatacgacttatttgtgtggatgcattactatgtatcgatggacgccctgctagggggcagcgaaatctggagggatatagactttgcacacgaagcgcccgcatttttaccatggcacaggttgttccttttgaggtgggagcaagaaatacagaaactgactggcgatgaaaacttcactatcccgtactgggattggcgggacgccgaaaagtgtgacatttgtaccgatgaatatatgggtggacagcaccccaccaatcctaacttgctatcgcccgcgtccttcttctcatcgtggcagatcgtctgctcccgcctcgaagaatataactctcaccagagtttatgtaatggcactcccgaagggccacttaggcgaaaccccggaaatcacgataaatcaaggaccccgcggctgccaagttctgcagatgtggagttctgccttagcctcacgcagtacgaatccggtagcatggacaaggccgctaatttttctttccgcaataccctagaggggttcgcttcaccactgacaggtatcgccgatgcctctcagtcgtctatgcataacgccttacatatctatatgaacggaaccatgtcccaggtgcagggttctgcaaatgatccaattttcctccttcaccatgccttcgtggattcaattttcgaacaatggctgcgacggcacagacccttgcaagaagtttaccccgaggcgaatgcgcccataggccacaaccgggagtcctacatggtcccattcataccgctatacaggaatggagatttttttatcagtagcaaggacctgggctacgattatagttatctgcaagactctgatccggattcgttccaggattatatcaagtcttacctggagcaggcgtcgcggatctggagctggctgctgggcgcggctatggtgggagcagttctgaccgcactactggcaggtctcgtgtccctgttatgtcgccataagaggaaacagctccctgaggaaaaacagcctttactgatggagaaagaggattaccactcgctatatcagagccacctc

SEQ ID NO: 20569 - DNA, 1587 bp, synthetic construct
  misc_feature 1..1587: note = source = /note="Description of Artificial Sequence: Synthetic coding sequence"
  source 1..1587: mol_type = other DNA
atgctgctggccgtcctgtattgcttactctggtcctttcagacttctgcaggtcacttccccagggcgtgtgtgtcatctaaaaacttgatggaaaaggagtgttgcccgccatggagtggagatcgttctccttgcggccaacttagtggccgcggctcttgccagaacatacttttgagcaacgcgcccctaggaccacagttcccctttacaggagtggacgaccgagagagctggccctccgtgttttataaccgcacttgtcagtgttctggtaactttatgggattcaattgtggaaactgtaagttcgggttctggggtcctaactgcaccgagcggcgcctgctggtgagaagaaatattttcgatctgtcagccccagaaaaagataagtttttcgcatacctgactcttgcaaaacatacgatcagttcagactacgtgattcctatcggtacttacggccagatgaagaatggcagcacaccaatgtttaatgacataaacatttacgatctctttgtgtggatgcactattacgtaagcatggacgcactgctcgggggatctgaaatttggcgggacattgactttgctcatgaagcgccagccttcctcccctggcaccggctgttcctcttgcggtgggagcaggaaatccaaaagcttaccggcgacgaaaatttcacgataccctactgggactggcgcgacgctgagaagtgtgacatttgcaccgacgagtatatgggcgggcagcaccccacgaatccaaatcttctgtcccctgcctcgttttttagttcatggcaaattgtttgcagccggcttgaagagtataactctcaccagtcactgtgcaatggcacgcctgagggacccctgcggcgtaacccagggaatcacgataaatccagaactccccgcctgccgagcagcgcagacgtcgagttctgtctgtctttgacacaatacgagagcggctcaatggacaaggcggcgaattttagttttcgtaacacactggaagggttcgcctctcccctgactgggatcgccgatgccagccagtccagtatgcacaatgcgctccatatttacatgaacggtacgatgtcacaggtgcaggggtcggctaatgaccctattttcttgctgcaccacgcgtttgtggattctatttttgaacaatggctgcgcaggcaccggccattgcaggaagtgtatcccgaagccaatgccccaataggacacaatagggagtcctatatggtgcctttcattcctctatatcgaaacggggacttttttatttccagtaaggatttgggctatgattattcatacctgcaggatagcgacccagattctttccaggattacataaaatcctatctggagcaggcctcccgcatctggtcatggctcctcggcgcggccatggtgggagcagtactgactgcacttctggcagggctggtctccttgctgtgcaggcataagaggaaacagcttccagaagagaaacaacctctgctgatggaaaaagaggactaccatagtttatatcaatcacacctg

SEQ ID NO: 20570 - DNA, 1587 bp, synthetic construct
  misc_feature 1..1587: note = source = /note="Description of Artificial Sequence: Synthetic coding sequence"
  source 1..1587: mol_type = other DNA
atgctactggccgttctgtactgcctgctttggtccttccagacatctgcgggccattttccgcgagcctgtgtgtcatcaaagaatctcatggagaaagagtgctgtccgccttggagtggcgataggagtccttgtggtcaactcagtggccggggatcctgtcaaaacatcctgctcagcaatgccccactgggaccccagtttccgttcacaggtgtggacgatcgtgagtcatggccttcagtcttttataacagaacctgtcagtgtagcggtaacttcatgggcttcaattgcggaaattgtaaatttgggttttggggacccaattgcacggaaaggaggctgctggtgagacggaatattttcgacttgtccgctcctgaaaaagacaagtttttcgcgtatctcacactggcgaagcacacaataagtagtgattatgtgattcccatcggcacatacggccagatgaaaaacgggtccactcctatgtttaatgacattaacatttacgatttgtttgtgtggatgcactactacgtcagtatggacgctctattggggggctccgagatctggcgagatatcgactttgctcacgaagcccccgccttcctaccctggcaccgattgttcctcctgagatgggagcaggaaattcagaaactgaccggggacgaaaacttcaccatcccttattgggactggagggacgcagagaagtgcgatatatgtacagatgagtacatgggcgggcagcatcccacgaaccccaacttacttagcccggcctcttttttttcttcctggcaaattgtctgctctcgtctcgaggagtataactctcatcaatccctgtgtaacggaactccagagggccctcttagaagaaatcccggcaatcacgacaagagccggactcccaggcttccgtcttctgccgacgtggagttttgcctctcgttgacccagtacgagagcggcagtatggacaaggcagcaaacttctcctttcggaatacgcttgagggctttgccagccctctgaccggcattgcagacgccagtcaatcaagtatgcacaatgcattgcacatttatatgaatgggacaatgtctcaggtgcaaggatccgccaatgatcccatcttcttgctgcaccatgcgtttgtcgacagcatcttcgaacaatggctgaggaggcaccggccgctacaagaggtgtacccagaggcgaatgctccaatcggtcacaatcgcgagtcctatatggtcccttttattcctctgtacaggaacggggactttttcattagttccaaagatctgggatacgactactcctacctgcaagactccgaccccgactcatttcaggattacataaagtcctatttggaacaggcctcacgtatctggtcgtggctgctcggtgccgccatggtgggggcagttctgacagcactcttggccggtttggtgagtctgctgtgtaggcacaaaaggaagcagctgcccgaagaaaagcagccactgcttatggagaaagaggactatcactccctttaccagagtcacctt

SEQ ID NO: 20571 - DNA, 1587 bp, synthetic construct
  misc_feature 1..1587: note = source = /note="Description of Artificial Sequence: Synthetic coding sequence"
  source 1..1587: mol_type = other DNA
atgctgctcgcagttttatactgcctgctgtggagctttcaaacaagcgcagggcatttccctagggcctgcgtgagctccaagaacctaatggaaaaagaatgctgtcctccttggtccggtgataggtccccctgcggacagctctccggcaggggttcatgtcagaacattctcctgtctaacgcccccctcgggccacagtttcccttcacgggggttgacgatcgggagtcatggccttcggtgttttacaacagaacctgccaatgttctggaaactttatgggttttaactgtggaaactgcaaattcggtttctggggtccaaactgcacagagagacgtctccttgtgcgccgaaatattttcgacttgtctgcgccagaaaaagacaagttctttgcttacctgacactggcaaaacacaccattagctcagactacgtcataccaattggcacctacggtcagatgaagaatggttcaactcccatgttcaacgacattaatatctacgatttgtttgtctggatgcactattacgtctccatggatgcactgctgggcggatccgagatttggcgagacattgatttcgctcatgaggctcctgcctttctgccctggcaccgtctgtttctgctgcggtgggagcaggagattcagaaacttaccggtgacgaaaactttactattccttattgggattggcgggatgctgagaagtgtgacatatgcactgatgagtatatgggtgggcaacacccaactaaccctaatcttctgtcgcccgcctccttcttttcgtcatggcagatcgtgtgttcgcggctcgaagagtacaattcgcaccagtctctgtgtaacgggacaccggagggaccgctgcgccggaaccccgggaatcatgataagtctcggacgccccgcctgccatcctccgctgatgtcgaattctgtttatctctgacccagtacgaaagcggttcaatggataaagccgcaaatttttccttccgcaacaccctggaggggttcgccagccccttaacaggaattgcagacgcctctcaatcttctatgcataacgctttgcacatctatatgaacggaacaatgtcccaagtccaggggagcgccaacgatccgatctttctgctgcatcatgcctttgttgatagtatctttgagcagtggctgcggaggcacagaccccttcaggaagtctaccccgaagctaacgcgccgattggccacaaccgggagagctacatggttccttttatcccattatacaggaacggggattttttcatttcgagtaaagacctcgggtatgactactcatacttgcaggactcagacccggacagtttccaggattatattaaatcatatctggaacaggcttcgaggatttggtcttggttgttaggtgctgccatggtaggcgccgtgctcaccgctctgttggctggacttgtaagcctgttgtgtcgccacaagcggaaacaactgcccgaagagaagcagccattgctcatggagaaggaggattaccactctctgtatcagagccatctc

SEQ ID NO: 20572 - DNA, 1587 bp, synthetic construct
  misc_feature 1..1587: note = source = /note="Description of Artificial Sequence: Synthetic coding sequence"
  source 1..1587: mol_type = other DNA
atgctgcttgccgttctctattgcctgttatggtcctttcaaacctctgctgggcacttcccaagggcctgcgtgtccagtaaaaatctcatggagaaagaatgttgtcccccttggtctggcgataggtctccgtgcgggcagctgagcggacggggatcctgccaaaacatcttactgagtaacgctcccctgggcccacagtttccattcacaggggttgatgaccgggagtcatggccaagtgttttttacaaccggacctgccagtgctcaggaaatttcatgggatttaactgtggcaattgcaaattcggattttggggtcctaactgcacagagcggcggctcctggtgcgcaggaacatcttcgatttgagtgcccctgaaaaggataagtttttcgcttacctcacattagcgaaacacaccatttcttccgactacgtgatacccataggtacgtacggtcagatgaagaacgggtcaacaccgatgttcaatgacatcaatatctacgatttgttcgtgtggatgcactattacgtctcaatggatgccctattaggtgggagcgagatctggagggatatcgacttcgcacacgaagcaccagcctttctcccgtggcacaggctttttctccttaggtgggagcaggagattcaaaagctcacgggcgacgaaaactttaccatcccatactgggattggagggatgccgaaaaatgtgatatctgcacagacgaatacatgggcgggcagcatcctaccaaccctaatctcctaagtcccgccagcttttttagttcctggcagatcgtctgctccagattagaggaatacaattcacaccagtccctttgcaacggaacccccgaagggccgttgagacggaatcctggtaatcacgacaagtctcgcacaccacgcttaccctctagtgcggatgtggaattttgtttatcccttactcagtacgagtccggctccatggacaaagctgccaatttcagcttcaggaacaccctcgaaggttttgcctctcctctgacaggaattgcagatgcttcccagagttctatgcataacgctctccatatatacatgaatggtacaatgtcccaggtccagggcagcgccaatgaccctattttcctgctgcaccacgcgtttgtagactcgatcttcgagcagtggttaagacgccatcggccccttcaggaagtctatccagaggctaatgcaccaatcggacacaatcgggaatcttatatggttccctttattcccttgtatcggaacggtgactttttcatttctagcaaggatctgggatacgactacagctatctgcaggactctgatcccgactcttttcaggactatatcaagtcttatcttgagcaagcatcgcggatctggtcatggctgctgggcgccgctatggtgggggccgttttaactgctttactcgctgggctcgtctcactgctctgcagacataaaaggaagcagctccctgaggaaaaacagccccttctgatggagaaggaagactatcactctctataccagtctcactta

SEQ ID NO: 20573 - DNA, 1587 bp, synthetic construct
  misc_feature 1..1587: note = source = /note="Description of Artificial Sequence: Synthetic coding sequence"
  source 1..1587: mol_type = other DNA
atgctcctggcagtgctgtactgcctgctgtggtccttccaaaccagcgcgggccacttcccgagggcttgcgtcagctcgaagaatctgatggaaaaggaatgctgtcctccgtggtcgggcgaccgaagcccctgcggtcaactgtccgggaggggaagctgccagaatatcctcctgtcgaacgctccgctcggcccccagtttccgttcactggcgtggatgaccgcgagtcctggccctcagtattctataaccgtacctgccagtgttctggcaacttcatgggattcaattgtggaaattgcaaatttgggttctggggtcctaactgtaccgagcggcggctgctggtgcgcagaaacatcttcgacctgtcggcaccggaaaaagacaagttcttcgcctacctgaccctcgcaaagcacacgatcagctcggattacgtcattccaatcggcacttacggacagatgaaaaacggtagcacgccgatgtttaatgacatcaacatttacgacctctttgtctggatgcactactacgtgtcgatggacgccctgctgggtgggtccgaaatctggagagatattgactttgcacacgaggcgcctgccttccttccgtggcataggttgttcctcctgcgctgggagcaggagatccagaaactcaccggagatgaaaacttcaccattccgtactgggactggcgagacgcggaaaaatgcgacatctgcactgatgaatacatggggggtcagcatccaactaatccgaaccttctgtccccggcctcctttttctcgtcgtggcagatcgtctgcagccgcctggaggaatacaattctcatcaatcactgtgcaacggaactccggagggaccactgcggcgcaatcctggtaatcacgacaagtcgcggactccacggctgccgagcagcgctgacgtggaattctgtctgtcgctgacccagtacgaatcgggctcaatggataaggcagcaaatttctcattccggaacactctggaaggatttgcatcgcctctgaccgggatcgctgacgcctcccaatcgtcaatgcataacgcgttgcacatatacatgaacggaactatgtcccaggtgcagggtagcgcgaacgatccaatctttctgttgcatcacgctttcgtggattcaatctttgaacagtggctcaggcggcacagaccgctgcaagaggtgtaccccgaggcaaacgcccctatcggacacaatagggaaagctacatggtcccgtttatcccgctgtaccggaacggagatttcttcatctcaagcaaagatctcggatacgactattcgtacctccaagactcagatcctgactcgttccaggactacatcaaatcctacctggaacaagcctcccgaatctggtcctggcttctgggtgccgcaatggtgggggctgtgctgactgcgctcctggccggtctggtgtccctgctctgccgtcacaaaagaaagcagctgccggaagaaaagcagcctctgctcatggaaaaggaggattaccacagcttgtaccagtcccacctg

SEQ ID NO: 20574 - DNA, 1587 bp, synthetic construct
  misc_feature 1..1587: note = source = /note="Description of Artificial Sequence: Synthetic coding sequence"
  source 1..1587: mol_type = other DNA
atgctcctcgctgtgctgtattgtcttctctggtcattccagacttccgccggtcattttccgagagcatgcgtctcatctaaaaatctgatggaaaaggaatgctgcccaccttggtccggggacagatcaccatgcggacagctatcggggcggggcagctgccagaatatcctgctgagcaatgctccactgggcccccagtttccttttaccggggtggacgatcgtgagtcgtggccaagcgtgttctataataggacatgccagtgtagcgggaatttcatgggcttcaactgcgggaactgtaagtttggattctggggcccaaattgcacggagcggaggttgctcgtgcgccggaacatttttgatctctccgcgccagaaaaagacaagttttttgcctatctgacactagcaaaacacaccatttcatcagattacgtcatcccaatcggtacttacggacagatgaagaatggttccaccccgatgtttaacgacattaatatatacgaccttttcgtttggatgcactattatgtgagtatggacgcgttgctgggaggctccgaaatctggcgcgacattgatttcgcccacgaggctccggcctttcttccctggcatcgcctcttcttgctgcggtgggagcaggaaattcagaaactgaccggcgacgagaacttcacaattccctattgggactggagggatgctgagaagtgtgatatctgtaccgacgaatatatgggcggccaacatccaaccaacccaaatctgttaagtcccgccagtttttttagcagttggcagattgtctgcagtagattggaggagtataattcacaccagtcgctgtgtaatggtacacctgaaggaccactgcgcagaaaccccgggaaccatgacaagtcgcgaacaccacgattgcccagttccgcagatgtggaattctgcctgtctcttacacagtacgagagtgggagcatggacaaggcagccaatttctcttttcgcaataccctggaggggttcgcctcccccctcacgggtatagccgatgccagccagtcaagcatgcacaacgcactccatatttatatgaacggtacaatgtctcaagtgcagggttctgcaaatgatccgattttcctcctgcatcacgcatttgttgattcaatctttgaacagtggctgcggaggcaccggccactccaagaagtctaccctgaggctaacgcccctattggccacaacagggaaagctacatggtgccgttcattcctctctaccggaatggtgacttcttcatttcatcaaaagatctcgggtacgactacagctacctccaagactccgaccctgatagctttcaggattacattaagtcctatctggagcaggccagccgaatatggagttggctgctcggcgctgcaatggtcggcgccgtgctgaccgcccttctcgccggcctcgtgagcttactctgtagacataaacgcaagcagctgcccgaggagaagcagcccttactcatggagaaagaggactatcattccctctatcagagtcacctg

SEQ ID NO: 20575 - DNA, 1587 bp, synthetic construct
  misc_feature 1..1587: note = source = /note="Description of Artificial Sequence: Synthetic coding sequence"
  source 1..1587: mol_type = other DNA
atgttattggcagtgctctactgcctgttgtggtccttccaaacaagcgccggccactttcctagggcatgcgtatcctccaagaatcttatggaaaaggaatgttgcccaccttggtccggcgatagatctccttgtggacagctgtctgggcggggatcctgtcagaacatcctgcttagcaatgccccactgggacctcaatttcccttcaccggagttgatgaccgggaatcatggcctagcgtgttttacaaccggacttgtcagtgctctgggaatttcatgggctttaattgcggaaattgtaaatttgggttttggggaccaaactgcacagagcgccgactcttagtccggcgcaacattttcgatctgtctgcccctgaaaaagataaattctttgcctacctcactctggcaaagcataccatctcatcggactatgtgatccccatcggaacctatggacaaatgaaaaacggctccactccaatgtttaacgatattaacatatatgacctgtttgtgtggatgcactactatgtgtcaatggatgctctgctagggggctctgagatctggcgggacatcgacttcgcccatgaagcccctgccttcctcccctggcatcgcctgttcctcctgcggtgggagcaagagatccagaaactgaccggagatgaaaactttacgatcccctattgggactggagggacgcagagaaatgcgacatttgtactgatgagtatatgggtggacaacacccgacaaaccctaatttgctgtcaccagcttctttctttagttcttggcagatagtatgctcaagattggaagaatacaattcgcatcagagcctctgcaacggtactcccgaagggccccttcgacgaaaccccggcaatcatgataagagtcgcacgccaagacttccaagctccgccgacgtcgagttctgcctgagcctgactcagtacgaatccggctcaatggataaagctgcaaacttctcttttaggaacaccttagaagggtttgccagcccacttaccggaatcgctgatgcgagccagagctccatgcacaacgccctgcacatctacatgaatggcaccatgagccaagtacagggttctgccaatgacccaattttcttgttacatcacgcctttgtggactccatctttgaacagtggctccggcggcaccgaccactccaggaagtgtacccagaggccaatgcccctattggacataacagagaatcttatatggtgcctttcatacctttgtaccgcaacggggatttctttatttcttcaaaggatctcgggtatgactatagctatctgcaagattcagacccagactcttttcaggactatataaagtcttatctggaacaggcctcaagaatctggtcttggctgcttggcgctgctatggtcggtgccgtgttgaccgcgttgctagccggcctggtaagtctcctgtgccgccacaagaggaaacagcttcccgaagagaagcagccccttttgatggagaaggaagactaccactcgctctaccagtctcactta

SEQ ID NO: 20576 - DNA, 1587 bp, synthetic construct
  misc_feature 1..1587: note = source = /note="Description of Artificial Sequence: Synthetic coding sequence"
  source 1..1587: mol_type = other DNA
atgctgcttgccgtactgtactgcttgctgtggagcttccagacttccgccggacacttcccacgcgcatgtgtgtcctcgaaaaacctgatggagaaggaatgctgccccccttggtccggcgaccgatccccatgtggtcaattgagcggacggggatcgtgtcaaaacatccttctgtcgaacgcaccgctgggcccgcagtttccgttcaccggcgtagacgaccgagagagctggccgtccgtgttctacaataggacctgccagtgctcgggcaatttcatgggatttaactgcggcaactgtaagttcgggttttggggaccgaactgcactgagcggcggctgttggtgcgccgcaacattttcgacctgagcgcaccggagaaggacaagtttttcgcctatctcacgctggcaaagcacactatatcctcggattacgtgatcccgattggtacttatggccagatgaagaacggctcaactccgatgttcaacgacatcaatatctacgacctgttcgtgtggatgcactactacgtgtcgatggacgcccttctgggaggttccgagatctggagagacatcgatttcgctcacgaagctccggctttccttccttggcacagactgttcctgttgagatgggaacaggaaatccaaaagctgaccggggatgagaactttaccatcccgtactgggattggcgggatgcagaaaagtgcgacatttgcaccgacgaatacatggggggccaacatccgaccaatccgaatctgctgagcccagcctccttcttttcttcctggcaaattgtttgctcccgcctggaggaatacaactcgcatcagagcctgtgcaacggaactccggagggaccactccggcgcaatcccggcaatcatgataaatcaagaactccacgcctgccatcatccgcggacgtcgaattctgtctctccttgacccagtatgaatcgggcagcatggataaagcggcaaacttttcgttccggaacactctggagggattcgcttccccgcttaccggtatcgcggacgccagtcagtcgtcgatgcataacgcgctccacatctacatgaatggaaccatgagccaagtgcagggcagcgccaacgatccaatcttcctcctgcaccacgctttcgtcgattcgatctttgaacaatggctccgccggcatcggccgctccaggaagtgtaccctgaggctaacgcaccaatcggccataaccgcgaatcatacatggtgcccttcatcccgttgtataggaacggagacttctttatctcatcaaaagatctgggatacgactactcctacctccaggactctgacccagattcctttcaggattacataaagtcgtacctcgaacaagcgtcgagaatctggtcgtggctgcttggtgccgccatggtgggggccgtgctcacggcccttctcgctggcctggtttcgctgttgtgcagacacaagcgtaaacagctgcctgaggagaaacagccactgctcatggaaaaggaggactaccattccctttaccagagccacctg

SEQ ID NO: 20577 - DNA, 1587 bp, synthetic construct
  misc_feature 1..1587: note = source = /note="Description of Artificial Sequence: Synthetic coding sequence"
  source 1..1587: mol_type = other DNA
atgctgctggccgtgctgtattgcctgctttggtccttccagacttcggcaggacactttccccgcgcctgcgtcagctcgaaaaatctcatggaaaaggagtgctgtccaccatggtccggagatcgctcgccttgcggtcagctttcgggccgcgggagctgtcagaacatcctgttgtcaaatgcgccactcggacctcagtttccattcactggggtggatgatcgggagtcatggccaagcgtgttctacaatcggacctgtcaatgttcaggcaactttatgggttttaactgtggcaactgcaagtttggattttggggcccaaactgcactgagagacgtcttttggtccgaagaaatatctttgatctttcggcacctgaaaaggacaagttttttgcgtaccttaccctcgccaagcatactatctcatcggactacgtgatccccatcggaacctacggacagatgaagaacggttccactcctatgtttaatgacattaacatatacgatcttttcgtgtggatgcattactatgtctcgatggatgcgctcctgggaggatccgaaatttggagagatatcgattttgcacatgaggcaccagctttcttgccttggcacaggctttttcttcttagatgggaacaagagattcagaagctgacgggagacgaaaacttcaccattccgtactgggattggcgggatgcggaaaaatgtgacatctgcactgatgaatacatgggtggacaacatcctaccaacccaaatctgctttccccagctagcttcttttccagctggcaaatcgtctgctcgagactggaggagtacaatagtcaccagtcgctgtgcaatggtacccccgaagggcctttgcggcgtaatccaggaaaccatgacaagtctcgcaccccgaggttgccaagctccgcggacgtcgagttttgtcttagcttgactcaatacgaatcagggagcatggacaaggctgcaaacttttcgttcagaaacaccctcgagggatttgcaagccctctgactgggattgcagatgcgtcccaaagctcgatgcacaacgcactgcatatctacatgaatggtactatgtcacaggtgcaaggttcggcaaacgatccaatctttctgcttcaccatgcattcgtggacagcatctttgaacaatggctgcgccgccacagacctcttcaagaagtgtacccagaagccaacgctcctatcggacataaccgggagtcttacatggtgccattcattcccctctaccgcaatggtgactttttcatttcctccaaggatctgggatacgattactcgtacctgcaggattcggacccggattcgtttcaagattacattaagtcctacctggaacaggcatccaggatctggtcctggttgcttggtgctgctatggttggagcagtgcttaccgctcttctcgcaggattggtatcgcttctctgtcgacacaagcggaaacaactgcctgaggagaagcaacctcttcttatggagaaggaagattatcatagtctctaccaatcccacctc

SEQ ID NO: 20578 - DNA, 1587 bp, synthetic construct
  misc_feature 1..1587: note = source = /note="Description of Artificial Sequence: Synthetic coding sequence"
  source 1..1587: mol_type = other DNA
atgctgctggcggtcctgtactgtctcctgtggtcatttcagacgagcgccgggcacttcccaagggcctgtgtgtccagtaaaaacctcatggagaaggaatgttgcccgccttggagcggagacaggtcaccatgtggtcagctgagtggaagaggctcgtgtcaaaatatcttgctgtcaaacgcccctttgggaccacaattcccatttactggagttgatgatagggagtcctggccttccgtattctacaacagaacctgccagtgcagtggcaatttcatgggctttaactgcgggaactgcaaatttggattttggggccctaattgcacagaacggcggctgctcgtgaggagaaacatttttgacctgtccgccccggagaaggataaatttttcgcctatcttaccctagctaaacacaccattagcagcgactatgtaattcctatcggcacatacggacagatgaaaaatggttccactcctatgttcaacgacatcaacatctacgacctgtttgtgtggatgcattattacgtcagtatggatgccctgctgggcggcagcgaaatctggagggatatcgatttcgctcacgaagctcccgcgttcctcccatggcaccgtctgtttctgttgagatgggagcaggagattcagaaactgacaggggatgaaaatttcacaatcccatactgggactggcgcgatgccgagaagtgtgacatttgcaccgacgaatatatgggcggccaacaccctacaaaccccaaccttctcagtccagccagcttcttttcgtcatggcagatcgtctgttcacggctcgaagaatacaattcgcatcagtccctgtgcaatggcactccagagggaccgttaagaaggaatcccggcaatcatgacaaatccagaacacctcgcctgccctccagtgccgacgtcgaattctgtttatctctgactcagtatgaatctggatcgatggacaaggccgctaattttagttttcgaaacacccttgaagggttcgcgagcccgctgactgggattgcagatgcctcacaaagctctatgcacaacgctctgcacatctatatgaatggcactatgtcccaggtgcaaggaagcgcgaacgatcccatattcctgctccaccacgccttcgttgacagtatatttgagcaatggctgaggcgccaccgcccgctgcaagaggtttatccggaggcaaacgcccccatcggtcataaccgcgaatcttacatggtaccattcatacccctgtacaggaacggcgatttttttatcagcagtaaggatctgggatacgactattcttatctgcaggattcagaccccgattcattccaggattatatcaaaagctatttggagcaggcgtcgcgtatatggtcgtggttgttaggcgccgctatggtgggggcggtcctgaccgccctactggcaggcctggtgagtttgctctgccggcacaaaaggaagcagcttcccgaggagaaacagcctctcctcatggaaaaagaagattatcacagcctgtatcagtcccacttg

SEQ ID NO: 20579 - DNA, 1587 bp, synthetic construct
  misc_feature 1..1587: note = source = /note="Description of Artificial Sequence: Synthetic coding sequence"
  source 1..1587: mol_type = other DNA
atgcttcttgccgtgctctattgtctgctctggagctttcagacaagcgcgggacattttcctcgcgcgtgcgtgtcatcaaagaacttgatggaaaaagagtgctgccccccgtggtctggcgacaggtccccatgcgggcaactctctggccgggggagctgtcagaacatcctactatccaatgcccccttgggcccacagttcccattcactggagtggatgatcgcgaatcttggccaagcgttttttacaaccgtacatgccaatgctcgggaaacttcatgggctttaattgcggtaactgtaagtttggattttggggcccgaactgcaccgagaggcggcttttggttcgaaggaacatctttgacctctccgctccagaaaaagacaagttttttgcctacttgaccctagctaagcacaccatctcctcggactatgtgatcccaattgggacatacggccagatgaagaatggtagtactccaatgttcaatgatattaacatctacgacctgttcgtgtggatgcactattacgtctctatggacgcactcctcggcggaagcgagatttggagagatatagatttcgcccacgaagctcccgcctttctgccatggcatcgacttttcctcctccgatgggaacaagaaatccaaaagctcaccggcgacgaaaactttaccattccttattgggactggcgtgatgccgagaaatgcgacatctgtaccgatgagtacatgggaggacagcatccaacaaaccctaacctcctgagccccgcgtctttcttttcttcttggcagatcgtgtgctcccgcttggaggaatataactcacatcagtccctgtgcaacggtacacccgagggacccttgcgacggaatcccgggaaccatgataagtctcgcaccccacgcttaccaagctccgccgatgttgaattttgcttgtctttgacacaatatgaatccggttcaatggataaggccgcaaacttcagttttagaaacacgctggagggctttgccagcccactgacaggaatcgctgatgcgtcacaatcatcaatgcataacgcactgcacatctacatgaatgggacaatgtctcaagttcagggtagcgccaacgacccaatctttttactgcatcatgccttcgtcgactcaatctttgaacagtggctgcgacgtcatcggcctttgcaggaagtgtaccctgaggctaacgcccctattgggcacaaccgcgagagttacatggtgcccttcattccattgtatcgtaatggagatttctttatctcatctaaagatctgggctatgattactcctacctccaagacagcgaccccgactcatttcaggactatataaagtcttacttagagcaggcctccaggatatggtcatggctgttgggagctgccatggtaggggccgtgctgacagccctgctcgctgggctggtatctctgctctgccggcacaagagaaagcagctacctgaagaaaagcaacccctgctaatggagaaagaagattaccacagcctgtatcaaagccattta

SEQ ID NO: 20580 - DNA, 1587 bp, synthetic construct
  misc_feature 1..1587: note = source = /note="Description of Artificial Sequence: Synthetic coding sequence"
  source 1..1587: mol_type = other DNA
atgctcctggcggtgctctactgtctgctgtggtcgttccaaacttccgcaggacacttcccgcgggcatgtgtgtcatccaaaaatctcatggagaaagaatgctgtccgccgtggagcggcgaccgctcgccatgtggccagctttcgggccggggctcatgccagaatatcctgctgtctaacgcgccactgggaccacaattccctttcacgggcgtggatgatcgcgagtcgtggccaagcgtgttttacaaccgaacctgccagtgcagcggaaatttcatgggatttaactgcggaaattgtaagtttgggttttggggacctaactgcaccgaaagaaggttgttggtgcggaggaatatcttcgatctctccgccccagaaaaggacaagttttttgcatatctgactctggccaagcacaccatctcctcagattacgtcatcccgattggaacctatggacagatgaagaacggctcgaccccaatgttcaatgatatcaacatctacgatctgtttgtgtggatgcactactatgtgagcatggatgccctgctgggcggaagcgaaatctggcgcgatattgacttcgcacatgaagcgcctgcattcctgccgtggcatcgcctcttcctcctcaggtgggagcaagaaatccagaaactcactggagacgaaaacttcactatcccatactgggattggcgcgacgccgaaaaatgcgacatctgcaccgacgagtacatgggtggacaacacccgactaacccgaacctgctgtcgccagcatcatttttcagctcgtggcagatcgtgtgctcgcggcttgaggaatacaattctcatcagtccctctgcaacggaactccggaaggaccgctcagacggaacccgggaaatcatgacaagagtcgcactccgcggctcccatcgtccgccgacgtggaattttgcctgagcctcacccaatacgagtcgggatcgatggacaaggcggccaactttagcttcagaaatactctggaaggatttgcgtccccactgaccggaattgccgatgcgtcgcagtcatccatgcacaacgctctgcatatctacatgaatggaaccatgtcccaggtgcagggatctgccaacgatccaatcttcttgctgcaccacgccttcgtggactcaatcttcgagcagtggctgcggcgccacagacctctgcaggaggtgtacccagaagctaacgcgccaattgggcacaaccgagaatcgtacatggtccctttcatcccgctgtaccggaacggggacttcttcatttcgtccaaggacctgggatacgactacagctacctgcaagactcggaccctgattccttccaagactacatcaaatcttacctggaacaagccagtagaatctggtcgtggctcctgggcgcggccatggtcggagcagtcctgactgccctgttggcagggctcgtctcactcctgtgcaggcacaagcgcaagcagctcccagaagagaaacagccgctgctcatggagaaggaggactaccatagcctctaccaatcgcatctg

SEQ ID NO: 20581 - DNA, 1587 bp, synthetic construct
  misc_feature 1..1587: note = source = /note="Description of Artificial Sequence: Synthetic coding sequence"
  source 1..1587: mol_type = other DNA
atgctgcttgctgtgctgtactgtctgctgtggtctttccagaccagcgctggccacttcccacgcgcctgcgtgtcaagcaagaacctgatggaaaaagagtgttgtcctccctggtccggcgatagatccccatgtggccagctttccggtcgcggaagctgtcagaacatcctgctgtctaatgctccacttggcccccaatttcctttcacaggtgtggacgaccgcgagagctggccatccgtgttttataataggacttgtcagtgctctggaaatttcatgggtttcaactgcggcaactgtaagttcggcttctggggtcccaattgcacagagaggcgtcttctggtacgcagaaatatcttcgacctgtctgctcctgaaaaagataaatttttcgcatacctgaccttggccaagcacaccatctcctctgactacgttatcccaatcggtacatatggacagatgaagaacggtagcactcccatgttcaatgatataaatatttacgatctctttgtgtggatgcactactatgtgtccatggacgcccttctgggaggttccgaaatctggcgcgatatcgacttcgctcacgaggcaccagccttcctgccttggcaccgcttgtttctgttgcgctgggaacaagaaatacagaagttgactggagatgaaaattttaccataccttactgggactggagggacgccgagaagtgtgacatctgcacagatgagtacatgggcggtcagcatccaactaacccaaacctgctcagtccagcatctttcttctccagctggcagatcgtgtgttcccgcttggaagaatacaactcacaccagagtctctgtaacggtactcctgagggtcctttgcgcagaaaccccggtaatcatgataagtcccgtacaccaaggttgccctcatcagccgacgtagagttctgtctctccctgactcagtatgaaagcggttccatggataaagccgccaatttctccttccgcaacactctggagggcttcgcttcacctcttaccggaatcgctgacgctagtcagtcttctatgcataacgcactgcatatctacatgaacggcacaatgagtcaagtccagggctccgcaaacgatccaatcttcttgctgcaccatgcttttgtcgactcaatcttcgagcagtggcttcgccgccacaggcccttgcaggaggtataccctgaagcaaatgctcctatcggtcataatcgtgaatcctacatggtgccctttatcccactgtatcgtaatggcgacttctttatcagcagcaaggatcttggctacgattacagttatctccaggattccgaccccgattccttccaggactacattaaaagctatctggagcaggcaagtaggatctggagctggctgctgggcgcagcaatggtcggtgccgtgcttacagccctcctggcaggtcttgtgtctctcctctgtagacacaagcgtaagcaactgcccgaggaaaagcagccactgctgatggagaaggaagactaccactctctgtaccagtctcacctc

SEQ ID NO: 20582 - DNA, 1587 bp, synthetic construct
  misc_feature 1..1587: note = source = /note="Description of Artificial Sequence: Synthetic coding sequence"
  source 1..1587: mol_type = other DNA
atgctgctggcagtcctctactgtctgctctggtcgttccagaccagcgctggacacttcccacgcgcctgcgtgtcgtcgaagaatctgatggagaaggaatgctgccccccgtggagcggagataggtcgccgtgcggacagctctccggtagaggaagctgccaaaacatcctgctgtcaaacgcgccgctgggaccacagttcccattcactggcgtcgacgatagagagtcgtggccctcagtgttctacaaccggacctgccagtgctcgggaaactttatgggatttaactgtgggaattgcaaatttggcttctggggcccgaactgcaccgagcggaggctcctggtccgccgcaacatcttcgacctgtctgcgccggaaaaagacaagttcttcgcataccttaccctggccaagcataccatctcatccgattacgtcatcccgattggtacttatggccagatgaagaatggttcaaccccgatgtttaacgacatcaatatctatgatctgttcgtgtggatgcactactacgtctctatggatgctttgctgggaggttcagagatctggcgtgacattgatttcgctcacgaggccccagcattcctgccctggcatcgactcttcttgctgcggtgggaacaggaaatccaaaagctgacgggggacgagaacttcaccatcccatactgggattggcgcgatgccgagaagtgcgacatctgcactgacgaatacatgggaggacagcacccgacgaatccaaacctgctgtcaccggccagcttcttttcatcctggcagatcgtgtgcagccgcttggaagaatacaactcgcatcaatcactgtgtaatggaaccccggagggaccactcagacggaatcccggaaaccatgacaaaagccggaccccacgcctcccgtcctcggctgacgtcgaattctgtttgtcccttactcagtacgaaagcggatcgatggataaggcggccaacttcagcttccgcaacactctggaaggcttcgcctcaccactgaccggaatcgccgatgcgtcccagtcgagcatgcataatgcgctccacatttacatgaacggaacgatgtcccaggtgcaaggttcggcgaacgacccgatctttctcctgcaccacgccttcgtcgattcgatctttgaacagtggctccggcggcatcgaccattgcaggaggtgtatccagaagctaatgccccgattgggcacaacagagagtcctacatggtgccgtttatcccgctttacagaaatggagacttctttatcagctccaaagatctcggatacgattactcctaccttcaagactctgaccccgactcatttcaagattacatcaagtcgtatctggaacaggctagcagaatttggtcatggcttctgggcgcagcgatggtgggcgcagtgcttactgcgctgctggctgggctggtgtccctgctgtgccgccacaagcgtaaacagttgccggaggaaaagcagccgctccttatggagaaagaggattaccactcgctgtaccagtcccatctg

SEQ ID NO: 20583 - DNA, 1587 bp, synthetic construct
  misc_feature 1..1587: note = source = /note="Description of Artificial Sequence: Synthetic coding sequence"
  source 1..1587: mol_type = other DNA
atgcttctcgccgtcctctactgtctgctttggtccttccaaacttcggcgggtcacttccctcgtgcctgtgtgagctcaaagaatcttatggaaaaagaatgttgccctccatggtcgggagatagatccccatgtggccaactttcgggacgggggtcctgtcagaatatccttctgtccaacgcaccacttgggccccagtttccttttactggagtggacgaccgggagtcgtggccttcagtgttttacaaccggacgtgccaatgctccggcaacttcatggggttcaattgcggaaactgtaagtttggattttggggcccaaactgtactgaacgacggctcttggtgcggaggaacatttttgacctcagcgcccctgaaaaagacaagttttttgcatacctgaccctggcgaaacataccatctcatcggattatgtgatcccaattggtacttacggacagatgaagaacggttccactccaatgtttaacgacattaacatttacgacctgtttgtctggatgcactactacgtgtcgatggacgcacttcttgggggaagcgaaatatggagagatatcgattttgctcacgaagcaccagcttttctgccgtggcatcgcctgtttcttctgcggtgggaacaagaaatccagaagctcacgggggatgagaactttaccattccatactgggactggagagatgcagaaaagtgtgatatttgcaccgatgagtacatgggaggtcaacaccctacgaaccccaatctgctgtccccagcatcctttttctcctcctggcaaattgtgtgctctcggctggaagaatacaatagccatcagtccctctgtaatgggaccccagaaggaccgctcagaagaaaccccggaaaccatgataagagccggacgcctagacttccttcatcagccgacgtggaattttgcctgtcgctcactcaatacgaatcaggatcgatggacaaggcagcgaacttctcgttcaggaacacccttgaaggattcgcatccccattgactggtattgccgatgctagccaatcaagcatgcacaacgcactgcatatctatatgaacggaactatgtcccaagtccaaggatccgcgaacgatccaatctttcttcttcatcatgcgtttgtggatagcatctttgagcagtggcttcgcaggcatcggcccctccaggaagtgtacccagaagcaaatgccccaatcggacataatagagaatcgtacatggtcccttttatcccgctttaccgcaacggagacttctttatcagtagcaaagacctgggttacgattattcgtaccttcaagactccgatcccgattcctttcaggattacattaagagctaccttgagcaggcctcgcgaatttggagctggcttctgggggcagcaatggtcggcgccgtgctgactgcactccttgcagggctcgtgagcctgctgtgcaggcataagaggaagcaactcccagaagaaaagcaaccactgctcatggaaaaggaagattaccatagcctgtaccaatcgcatctg

SEQ ID NO: 20584 - DNA, 1587 bp, synthetic construct
  misc_feature 1..1587: note = source = /note="Description of Artificial Sequence: Synthetic coding sequence"
  source 1..1587: mol_type = other DNA
atgcttctggcagtgttgtactgtctcctttggtcgttccagactagcgcaggtcatttcccccgcgcatgcgttagcagtaagaatctcatggagaaggaatgttgtccaccatggagcggtgatcgctccccttgtggacagctgagcggtcggggatcatgtcaaaacattcttttgtccaatgcaccacttggaccgcagtttccattcaccggcgtggacgatcgcgaaagttggccgtcggttttctacaatagaacctgccaatgctcaggtaacttcatgggatttaactgcggtaattgtaagtttggattctggggtccaaattgcactgagcggcgccttcttgtgagaagaaatatctttgacctgtcggcacccgagaaggacaagttctttgcataccttaccctggcaaaacataccatctcgtccgactacgtgattcccattggtacgtacgggcaaatgaaaaacggctcgaccccgatgtttaacgatatcaacatatacgatctttttgtgtggatgcactactatgtgtccatggacgccctgcttggggggtccgaaatttggcgagatattgactttgcacacgaggcacccgcatttcttccatggcacagactgtttctgctgcgctgggagcaagaaattcagaagctcaccggtgatgaaaacttcactattccatattgggactggagggatgcggagaagtgcgatatctgcacggacgagtatatgggaggtcaacatcctactaatcccaacctgctgtcgccagcatcgtttttctcatcctggcagatcgtgtgttcgagacttgaagagtacaactcacatcagtccctgtgtaacggaacccccgaaggccctctgcggaggaaccctggaaaccatgataaatcgaggactccaaggcttccctccagcgccgatgtggaattttgcctttccctcactcaatacgaatcgggttccatggataaggcagcaaatttctcattccggaacaccctcgagggattcgcatcgccactgaccgggattgcggatgcatcgcaaagcagcatgcataacgccctccacatctacatgaacggtacgatgtctcaggttcagggtagcgcaaacgatcctattttcctcctccaccacgcctttgtggatagcatctttgaacaatggcttcgtagacatcgacctttgcaggaggtctacccagaggccaatgcccctattggtcataacagggagtcgtacatggtgccattcattcctctttacagaaacggcgatttcttcatctcgtctaaagacctcggatacgattactcctatcttcaagacagcgacccagattcctttcaagattacatcaaatcgtacctggagcaggcaagccggatctggtcgtggcttctgggagcagcaatggtgggggcagtcctcactgcccttcttgcgggcctggtgtccctgctctgcaggcataagagaaagcaacttcccgaggaaaaacaacctctcctgatggaaaaggaagattaccatagcctctaccagtcccatctg

SEQ ID NO: 20585 - DNA, 1587 bp, synthetic construct
  misc_feature 1..1587: note = source = /note="Description of Artificial Sequence: Synthetic coding sequence"
  source 1..1587: mol_type = other DNA
atgctgctagccgttctgtattgcctcttatggtcattccagacctcggccggacatttccctcgggcttgcgtatcttccaagaacctgatggaaaaagagtgctgcccaccatggtccggcgacagatccccatgcgggcagcttagtggtcgagggtcttgtcagaacatccttctctctaatgctccgttaggacctcagttcccatttaccggggttgatgacagagagtcctggcctagcgtgttttacaaccggacttgtcagtgctccgggaatttcatggggttcaactgtggtaattgcaagtttggcttttggggccctaattgcactgagagacgcctgctggtgcggagaaatatctttgacctttccgcccccgagaaagataagttctttgcttatctgaccctggccaagcatacaatatcttcagactatgtgattcccatcggcacttatggccagatgaaaaacggttccactcccatgtttaacgatatcaatatttacgacctctttgtttggatgcactattacgtctccatggatgctcttttgggcggatccgagatctggcgcgacatcgactttgcccatgaggctccggcatttctcccctggcacagactctttttgcttaggtgggagcaagagattcagaagttaacgggggatgagaattttacaataccctattgggactggcgagacgcagaaaagtgtgacatctgtactgacgaatacatgggggggcaacaccccactaacccaaatctgttgtccccagctagcttttttagctcgtggcaaatcgtttgctcacgactggaggaatataacagtcaccaatcactgtgcaacgggactcccgaagggccactgcggcgtaaccctgggaaccatgacaagtcccgcaccccaaggcttccttcgtcagccgatgtggagttttgcctttcgctgacgcagtacgagagtggctccatggacaaggcggcgaacttctccttcagaaacaccctagagggattcgctagccctctgaccggaatagcggacgcctctcagtcttcaatgcacaacgcactccatatctacatgaacggcaccatgtcacaggtacaggggtctgctaacgacccaatatttttactgcaccatgcatttgtcgactctatcttcgagcaatggcttcgcagacacagacctctgcaggaggtttacccagaggccaatgccccgattggtcataatcgcgaatcctatatggtgcctttcatcccattgtacaggaatggagactttttcatttcttcaaaagatttggggtatgactattcttatctccaggactccgatcccgattctttccaggactacattaaaagctatctcgagcaggcttctaggatctggagctggttactgggggccgcgatggttggcgctgtcctcacagctctgctggcgggattagtgagcctgctgtgccggcacaaacgcaagcaactgcccgaggagaagcaacctctgctcatggagaaagaagactatcactctctatatcagtcacatctg

SEQ ID NO: 20586 - DNA, 1587 bp, synthetic construct
  misc_feature 1..1587: note = source = /note="Description of Artificial Sequence: Synthetic coding sequence"
  source 1..1587: mol_type = other DNA
atgctgctcgctgtcctctactgcctgctgtggtcatttcaaacatctgctggccattttccaagggcgtgtgtgtcctcaaaaaacctgatggagaaggagtgctgtcccccatggagcggagatcggtcaccttgcggacagctgtccggaagaggcagttgccagaacatcctcctgtctaatgctcctctggggccacagtttccattcacgggcgtggacgatcgggagtcttggccctcagtgttctacaaccgcacgtgccagtgctcaggaaacttcatggggtttaattgcgggaactgcaagtttggattttggggcccaaactgcacagaacggcggctgttggtaagacgaaacatttttgacttgtcagctcccgagaaggacaaattcttcgcctacctgaccttggccaagcacaccatatcctctgattacgtcatcccaatcggcacctacggccagatgaaaaatggttctaccccgatgttcaacgacataaatatctacgaccttttcgtgtggatgcactactacgtgtccatggatgcactgttgggggggagcgagatctggcgcgacattgatttcgcccatgaggcgcctgcgttcctgccgtggcatcgactcttcctcttgcgatgggagcaagaaatccaaaaattgaccggcgacgaaaactttacaataccctattgggattggagggatgcggaaaagtgcgatatctgtaccgatgagtatatgggagggcagcacccaaccaatccaaatctgctgtcccccgcttcattcttctcatcttggcagattgtttgcagccggcttgaagagtacaattcccaccagagcctgtgtaatgggacaccggagggcccactgagacgcaaccccggcaatcacgataaatctcgaactcctcggttgcccagctccgctgacgtggagttctgcctttcactgacacagtatgaatccggctccatggataaggccgccaacttctcattcaggaacaccttggaggggtttgcctctccactcacgggcattgccgatgccagccaatcctccatgcacaatgctcttcacatctatatgaatggcaccatgtcacaggtccagggatcagccaacgaccccatttttctgctgcaccatgctttcgtagacagtatcttcgagcagtggctccggagacaccggcctctgcaagaggtgtatcccgaggcaaatgcccccatcgggcataatcgggagagttacatggtgcccttcattcccctgtataggaatggagacttttttatctcctcaaaggacctggggtacgactacagctaccttcaggattctgatcccgatagtttccaggactacattaagtcatatttggagcaagcatctcggatctggtcctggctgttgggcgctgctatggtgggggcagtactgaccgcccttctggcgggtctcgtgtctctgctttgcagacacaaaaggaagcagcttccagaggaaaagcagcccctgctgatggaaaaagaggactatcacagcctgtatcagagccacctg

SEQ ID NO: 20587 - DNA, 1587 bp, synthetic construct
  misc_feature 1..1587: note = source = /note="Description of Artificial Sequence: Synthetic coding sequence"
  source 1..1587: mol_type = other DNA
atgctgctcgccgtgctctattgtcttctgtggagttttcagacttctgcagggcatttcccccgggcttgtgtttcatcaaagaacctgatggaaaaggaatgctgtcccccttggtctggcgaccgatccccttgtggccagctctccggacgcggatcctgtcagaacatcttactatcaaatgcccccctgggacctcagttcccttttaccggagtagatgatcgagagtcctggccttccgtgttttacaacagaacttgccagtgctctggcaatttcatggggttcaactgcggaaactgtaaattcggtttttggggtccaaattgtactgagcggcgcctactcgtgagaaggaacattttcgatcttagcgccccggagaaggataaattctttgcttacctgaccctggcgaagcacaccataagttccgactatgttatcccaattggaacgtatggtcagatgaagaatgggagcacacccatgtttaatgacatcaatatttatgacctatttgtctggatgcactactacgtctctatggacgcattgctgggggggagtgagatttggcgcgacattgacttcgcccacgaagctcctgccttcctgccctggcatagactatttctgctacgttgggagcaggaaatacagaagctgactggcgatgagaacttcacaattccctactgggattggcgggacgcagaaaagtgcgatatatgtacagatgagtatatgggcggtcagcacccgaccaaccccaaccttctgtcccctgcatcatttttctcttcttggcaaatagtgtgcagccgtctcgaggaatataattcccaccagtcactctgcaatggtacaccagagggtcctctgagacgtaatcccggcaatcacgacaagtcacgaacaccccggctgccttccagtgccgacgttgaattctgtctttctctcacccaatatgaatctggtagcatggacaaagccgccaatttttctttcaggaataccttggaggggttcgcttcccccctgactgggatcgccgacgcgtcacagtcctcaatgcataatgcgttgcacatttacatgaatgggacgatgagtcaggtacagggatcagccaacgatcccatctttctcttacaccacgctttcgtggactctattttcgaacaatggctcagacggcaccggccactgcaggaggtatatcctgaagcaaatgcccccatcggccacaatagagagagttatatggtccccttcatcccactgtaccgcaatggggacttctttatttcatcaaaagacctcggttatgactattcttatctgcaagatagcgaccctgattcgtttcaagattatatcaaatcctacttggaacaagccagccgcatttggtcatggctattgggtgctgcgatggttggagccgttttaaccgccttgctggccgggctggtcagcctgctttgtagacacaagaggaagcaacttcccgaggaaaagcagcccctcttgatggaaaaggaagactaccattctctctatcaatctcacctt

SEQ ID NO: 20588 - DNA, 1587 bp, synthetic construct
  misc_feature 1..1587: note = source = /note="Description of Artificial Sequence: Synthetic coding sequence"
  source 1..1587: mol_type = other DNA
atgctgctcgccgtgctgtactgtctgctgtggagctttcaaacttccgctggacacttcccgcgggcttgcgtctcatcgaaaaacctgatggagaaagagtgttgccctccttggtcgggggatcgctccccctgtggtcaattgagcggacgaggctcctgccagaacatcctgctctccaacgcgcctctgggtccgcagttccctttcaccggagtggacgaccgcgaatcgtggccctccgtcttttacaaccgcacgtgccagtgctctggaaactttatggggttcaactgcgggaactgcaaattcggattctggggacctaattgcacggaacgcagattgcttgtgcggagaaacattttcgacctttccgcccctgaaaaggataagttttttgcatatctgaccctggccaagcacactatcagttcggactacgtaatcccaattggcacctacggacagatgaagaatggaagcactccaatgtttaacgatatcaatatctacgatttgttcgtgtggatgcactactacgtcagcatggatgcgcttcttggcggctccgagatctggagagatatcgacttcgctcacgaggcaccggctttcctgccgtggcaccgcctgttcctgctccgctgggagcaggaaatccagaagctgaccggagacgagaacttcactatcccatactgggactggagggatgcagaaaaatgtgatatctgcaccgacgaatacatgggaggacagcacccgaccaatcctaacctgctcagcccagcgagctttttcagctcctggcaaatcgtgtgctctcggctggaagagtataactcacatcagtcgctctgcaatggaactcctgaaggaccactgaggagaaaccctggcaaccatgacaagtcacgcacccctcggcttccgtcgtccgccgacgtggaattctgtctgagcctcacccagtacgagtcaggatccatggacaaggccgctaacttttcattccggaacactctggaagggtttgcgagccctctcaccggaatcgccgatgcctcccagagcagcatgcacaacgccttgcacatatacatgaacggtaccatgtcgcaggtgcagggatcggcgaacgatcctatctttttgctgcatcatgcttttgtggactcaatctttgagcagtggctgcgccgccaccgcccgcttcaggaagtgtacccagaagccaatgctccaatcggccataaccgagaatcatacatggtgccattcattcccttgtaccgcaacggggactttttcatcagctcgaaagatcttggatacgactactcatacctccaggatagcgatcccgattctttccaggactacatcaagagctacctcgagcaggcttcgcgtatttggtcatggctcttgggagcagcgatggtgggagcagtgcttactgccctgctggcgggattggtttcgctcctgtgcagacacaagcgcaagcagctgccagaggaaaagcagccactcctgatggaaaaggaggactatcactcactgtaccaatcccatctg

SEQ ID NO: 20589 - DNA, 1587 bp, synthetic construct
  misc_feature 1..1587: note = source = /note="Description of Artificial Sequence: Synthetic coding sequence"
  source 1..1587: mol_type = other DNA
atgctgctcgccgtcctctattgcttgctgtggagcttccagaccagcgctggccacttcccgcgcgcttgcgtgagttcgaaaaaccttatggagaaggaatgctgtccaccctggtcgggggacagatccccctgcggacagctgtcgggccgcgggtcatgtcagaatatcctgctttctaacgccccgctgggaccccaatttccgttcactggcgtcgacgatcgggagtcctggccttctgtgttctataacagaacctgtcagtgctccggcaacttcatgggctttaactgtggaaattgcaagttcggattttgggggcccaattgcacggagcggcgtctcctggtgcgccgtaacattttcgatctgagtgccccggagaaggacaagttcttcgcttacctgaccctggccaagcataccatcagctcagattacgtgatccctatcggaacttatgggcagatgaagaatgggtcaaccccgatgtttaacgatatcaacatctacgacctgttcgtttggatgcattactacgtgagcatggacgcacttctgggaggtagcgaaatttggagagacatcgacttcgcacacgaagctccggcttttctgccgtggcacagactgtttctcctgaggtgggagcaggagatccaaaagctgactggagatgagaatttcactatcccgtactgggattggcgcgacgccgaaaagtgtgatatatgcactgacgagtacatgggcggacagcatcccactaatccgaacctgctgtcgcccgcgtcattcttcagctcatggcagatcgtgtgctccaggctggaggaatacaactcccaccagtccttgtgcaacggaacgcctgagggtccgctgaggagaaatccgggtaaccatgacaaatcaagaactccgcggctgccatcatcagctgacgtcgaattctgcctgagcctgactcaatacgagagcggatcaatggataaggccgccaacttctccttccgcaacactctggaggggtttgcctcgccgctcaccggcatcgccgacgcctcgcaatccagcatgcataacgccctgcatatctacatgaatggaacgatgtcgcaggtgcaaggatcggctaacgacccgattttcttgctgcaccacgcgtttgtcgactccatattcgaacagtggcttcggagacacagaccgctccaggaggtgtacccagaagctaatgccccaatcggacacaatcgcgagtcgtacatggtgccatttatcccattgtaccgcaacggtgatttctttatcagctccaaggatcttggatacgactactcctatctccaagattccgacccggattcctttcaagactacatcaagtcgtaccttgagcaggcaagccggatttggtcatggctgctgggtgcggccatggtcggggccgtgctcaccgctctcctggcaggattggtttctctgctctgtcgccacaaaagaaaacagctccctgaagagaaacagcctctcttgatggagaaagaggactaccattcgctctaccagtcgcatctg

SEQ ID NO: 20590 - DNA, 1587 bp, synthetic construct
  misc_feature 1..1587: note = source = /note="Description of Artificial Sequence: Synthetic coding sequence"
  source 1..1587: mol_type = other DNA
atgcttttggcggtcctctactgcctgttgtggtccttccaaacttcggccggacacttcccgagagcctgcgtgtccagcaagaacctgatggagaaagaatgttgtccaccgtggagcggtgaccggagcccatgcgggcagctgtccggccgtggatcatgccagaatatcttgttgtcaaacgcgccgctgggacctcagtttccatttaccggagtggacgaccgggaatcctggcctagcgtgttctacaaccgcacctgccagtgttcaggaaacttcatgggattcaactgcgggaactgcaagttcggtttttggggtccaaactgcactgaaaggcgcctgctcgtgcgccgaaacatttttgatctgtcagcgcccgaaaaggacaagttcttcgcttacctgactctggctaagcacaccatctcgtccgactacgtgatcccaataggaacttacggtcagatgaaaaatggttcaactcctatgtttaacgacatcaacatctatgacctcttcgtctggatgcattactacgtttcgatggatgcactcctcgggggctctgagatttggagggatatcgatttcgcccacgaggcgccagcctttttgccgtggcacagactgtttctgctgagatgggaacaagagatccagaagttgaccggagatgagaactttaccatcccgtactgggattggcgtgacgctgaaaaatgcgatatctgcacggacgaatacatgggtggacagcatccaaccaacccgaatctgctgtcgccggctagcttcttctcctcatggcagatcgtctgttcgagactcgaagaatacaattcacaccagagcctgtgcaacggaacgccggaaggaccactgcggaggaatccgggtaatcacgataagtcacggactcctcgcctgccgtcgtccgcagacgtggaattctgcctgtcgctgactcagtacgagagcggatcgatggacaaggcagcgaatttctcattcaggaataccctcgagggatttgcctcacctctgaccggtatcgcggatgccagccaatcatccatgcacaatgccctgcacatctacatgaatggcactatgtcccaagtccaaggaagtgccaacgacccgatcttccttctgcatcatgcgttcgttgacagcatttttgaacaatggctgcggcggcataggcctctgcaggaagtgtacccggaagcaaacgcgccaattggtcataatcgggagtcctacatggtccctttcatcccgctgtaccgaaacggagacttcttcatctccagtaaagacctgggatacgactactcgtaccttcaagactcagaccctgactcgttccaagactatatcaaatcctacctggaacaggcatcccggatctggagctggttgctgggcgccgcaatggtgggcgctgtgctgacggcactgctggccggactcgtctccctcctctgtcgccacaagcgcaaacagctgccagaggaaaagcagccgctgttgatggaaaaggaagattaccattcgttgtatcaatcccatctt

SEQ ID NO: 20591 - DNA, 1587 bp, synthetic construct
  misc_feature 1..1587: note = source = /note="Description of Artificial Sequence: Synthetic coding sequence"
  source 1..1587: mol_type = other DNA
atgttgcttgctgtgctttactgtttgctgtggtcattccagacctcagccggtcactttcctcgcgcctgtgtcagtagtaagaacctgatggaaaaagagtgttgccctccctggagcggggatcgctctccttgcggccagctcagcggtcgcggtagctgtcaaaatatcctgctatcaaacgcccccctgggtccacagttcccctttacaggtgttgatgatcgtgagtcctggccctcagtgttttacaaccggacatgccaatgtagcggcaattttatgggattcaattgtggaaactgtaaatttggattctggggccccaactgtaccgaacgccggctactggtgaggcgcaatatcttcgatctaagcgctcccgagaaagataagttctttgcttacttgacgctggccaaacacaccatttcgtctgactatgtgatcccgatcggcacttatgggcagatgaagaatggatccactccaatgtttaacgacataaatatctacgacttgttcgtctggatgcactattatgtgtctatggatgcccttcttggtggaagcgagatatggagggatatagatttcgcccacgaggcgcccgcctttttaccttggcataggttattcctgctccgctgggagcaggagatccagaagttaaccggcgacgaaaacttcaccattccttactgggactggagggatgctgaaaagtgtgacatctgcactgatgagtacatgggtggacagcacccgacgaaccccaatctcttatcccccgcctccttcttctcatcctggcagattgtgtgctcccgcctggaggaatataattctcatcagtcactttgtaatggaactcccgagggaccactcaggcggaaccctgggaatcacgacaagagtagaaccccaagactgccctcatcagctgacgttgaattctgtctttctcttacacaatacgaaagcggctctatggataaagccgccaatttctccttccgtaataccctggaagggtttgccagccctttgacggggattgcagatgcatctcagtcttcaatgcacaacgctctccacatctatatgaatggtacaatgagccaagtacagggcagtgcaaacgatcccatctttctgctacatcatgcctttgtcgatagcatattcgaacaatggctgaggaggcatcgccccctccaagaggtgtatcctgaagccaacgctccgatcgggcataatcgcgagtcttacatggtccccttcatccccctgtatcggaacggggactttttcatctctagcaaggacctcggttatgactactcttatctgcaggactccgatcccgattctttccaggactatattaagtcctacctggagcaggcatcccggatttggtcatggttgttgggtgctgcaatggtgggagctgtcttgactgccctgctcgccggacttgtgtctttgttatgccgccacaagagaaaacagctgcccgaggaaaagcagcctctcctgatggagaaggaggattatcattcgctatatcagtcccacctt

SEQ ID NO: 20592 - DNA, 1587 bp, synthetic construct
  misc_feature 1..1587: note = source = /note="Description of Artificial Sequence: Synthetic coding sequence"
  source 1..1587: mol_type = other DNA
atgctcctggccgtgctgtactgcctgctgtggagctttcaaacttcggcaggacactttccgcgcgcttgtgtcagctctaagaacctgatggagaaagagtgctgccctccctggtcaggggacaggtcgccatgcggccagctgagcggtcggggcagttgccagaacatcctgcttagcaacgcgccacttggaccacagtttcctttcacgggagtggacgatagagaaagctggccttccgtgttttacaatcgcacctgtcagtgttcgggaaatttcatgggattcaactgcggcaattgtaagtttggattctggggcccgaattgtactgaaagacggctccttgtccggagaaacatttttgacctctccgcaccagagaaagacaagttctttgcctacttgacgctcgcaaagcataccatatcctccgattacgtgattccaattgggacctacggtcagatgaaaaatgggagcactcccatgttcaatgatatcaacatatacgacctgtttgtgtggatgcattactacgtgagcatggacgccctccttggtggtagcgagatttggcgcgatattgatttcgcacacgaagcaccagcatttctcccgtggcatagactttttctcctgaggtgggaacaagaaattcaaaagctgaccggagacgagaactttacgatcccatactgggactggcgcgacgccgaaaagtgcgatatttgtactgatgagtacatgggaggacagcatcctaccaaccccaacctgctgtcaccggcttccttcttttcatcttggcagatcgtgtgttcccggcttgaagaatacaactcccaccaatcgctttgtaacgggactcctgaggggccacttcgtcgaaatccaggaaatcatgataagtccagaacgcctcgactgccctcgtccgcagatgtggaattctgtctttccctcactcagtacgaatctggatcgatggataaagcagctaacttttcgtttagaaacaccctggaggggtttgcatccccgcttactggaatagccgatgcatctcaaagctcgatgcataacgcactgcacatttacatgaatgggactatgagccaagtccagggctcggccaatgatccgatttttcttctgcatcacgcatttgtggattcgatcttcgaacaatggcttcgtagacatcggccgctgcaggaagtgtacccagaagcaaacgcgcctattggacataaccgtgaatcgtacatggtgcccttcattccgctttaccgaaatggtgatttcttcatctcgtcgaaggatctcggatatgattactcttatctccaagactcggaccctgatagttttcaagattacatcaagtcgtacctcgagcaagcaagcagaatttggtcatggttgcttggggcggccatggtgggcgctgtgctgactgccctgttggcgggactcgtgtcgctgctctgtagacataaacgaaagcaattgccagaggaaaagcagccgttgcttatggagaaggaagattaccactccctgtatcagtcgcatctt

SEQ ID NO: 20593 - DNA, 1587 bp, synthetic construct
  misc_feature 1..1587: note = source = /note="Description of Artificial Sequence: Synthetic coding sequence"
  source 1..1587: mol_type = other DNA
atgctgctggccgtgctatactgcctgctgtggtcatttcaaaccagtgcagggcactttccccgagcctgcgtcagcagcaaaaacttaatggagaaagagtgttgccctccttggtcaggcgatcgtagcccctgcggacagctgtccgggcgtgggagctgtcagaatatcctattgtctaacgctcccctcggcccacagttccctttcaccggcgttgatgaccgcgaatcttggccctcagtgttttataatcggacatgtcaatgcagcggaaactttatggggttcaattgtgggaattgtaagtttggcttctggggtcccaattgtactgaacggcgcctactggtccgacgcaacatttttgatctgagcgcccccgaaaaagataagttttttgcctacctgacactagctaaacacacaatcagtagcgattatgttatccccattggtacttacgggcaaatgaagaatggtagtaccccaatgttcaatgacattaatatttacgacctgtttgtgtggatgcattactacgtgtctatggacgccctgctgggagggtccgaaatctggcgcgacattgacttcgcccacgaggccccagccttcctaccttggcaccgcctgtttctgctacgatgggagcaggagattcaaaagctgactggggatgagaacttcactatcccttactgggactggcgggacgcagaaaagtgcgacatctgcaccgacgagtatatgggaggtcaacatcccactaaccccaacctgctcagccccgctagcttcttcagcagctggcaaatcgtctgcagtaggctggaagaatacaacagccaccagtccctctgtaatgggaccccagagggccccctgcggaggaatcctggcaaccacgacaaatctcgaactcctcgccttccttcttctgctgatgtggaattctgcctgagtctgacacagtacgagtccggttctatggataaggctgccaatttctctttccggaataccctggagggttttgcttctccattaaccgggatcgcagacgcatcccaatcttccatgcacaatgccctgcacatctacatgaatggcacaatgagtcaggtgcagggcagcgctaacgacccaatatttctgctacaccacgcctttgtggacagtattttcgaacaatggcttcggagacatcggccgttacaggaggtgtaccctgaggccaacgctcctattggccacaaccgcgagtcttacatggtcccttttatcccattgtataggaacggcgacttcttcattagtagcaaggacctaggctacgattacagctatctgcaggacagtgacccagactcttttcaggactacattaaatcttatctggagcaggcctctcgcatttggagttggctgcttggcgctgctatggtcggggccgtgctgaccgccctgctagccgggctggtgtccctgctgtgccgacacaaaagaaaacagctgcctgaagagaagcagcctctgttaatggaaaaagaggattatcattctctgtaccagagtcacttg

SEQ ID NO: 20594 - DNA, 1587 bp, synthetic construct
  misc_feature 1..1587: note = source = /note="Description of Artificial Sequence: Synthetic coding sequence"
  source 1..1587: mol_type = other DNA
atgttgctcgcggtgctttactgcctgctttggtcgtttcagacttccgccggacatttccccagagcctgtgtgtcgtcgaagaatctcatggagaaggaatgttgtccaccttggtcaggtgatcggtcgccttgtggccaactgtccggaagaggaagctgccagaacatacttctgtccaacgcgcctctcggccctcaatttccatttacgggcgtggatgacagagaaagctggccaagcgtcttttacaatcgtacctgtcaatgttcgggaaacttcatgggttttaactgcggtaactgcaagttcggtttttggggccctaattgtactgaacggaggctgttggtgagaagaaatatctttgatctgtccgctccggagaaggataagttctttgcctacctcactcttgccaaacacaccatttcttccgactacgtcattcccatcggcacctatggtcagatgaagaatggcagcactccgatgttcaacgacatcaacatttacgacttgttcgtgtggatgcattactacgtgtcaatggatgccctgttgggaggatccgagatctggcgggatattgatttcgcacatgaggcacctgcatttctcccttggcatcgactgtttctcttgcggtgggaacaggagatacaaaagctgactggagatgagaactttactattccgtactgggattggcgtgatgcggagaagtgtgatatatgcaccgacgaatacatggggggtcaacacccaactaatcctaaccttctgtctccggcttcgttcttctcctcgtggcagattgtctgttcacgccttgaagaatacaactcacatcagtcgctctgtaatggaactccagagggcccactcaggcgaaaccccgggaatcatgacaagtctaggaccccaagacttccttcctcagctgacgtggaattctgcctctcactgacccaatacgaatcagggtcaatggataaggcagcaaacttttcgtttcgtaacaccttggagggatttgcctctcctctgaccggtattgcagatgcctcgcaatcgtccatgcataacgcacttcacatatacatgaacggaacgatgagccaggtgcaaggaagcgcaaacgaccctattttcctcttgcatcacgcgttcgtcgattcgatttttgaacagtggcttcgccgacacaggccgttgcaggaggtgtaccccgaagcaaacgccccaatcgggcataaccgcgaatcctatatggtgccgtttatccccctctaccgcaatggtgactttttcatatcgtcgaaagatctgggttacgattactcatatctccaagactcggacccagactcgtttcaggactacatcaaatcataccttgaacaggcttcgcgtatttggtcctggttgcttggagcagcgatggtgggggcagtccttaccgcactgctggcaggtcttgtgtcattgctgtgtaggcataaacggaaacaactgccagaagaaaaacaaccgctccttatggaaaaggaggattaccatagcctttaccaatcgcatctg

SEQ ID NO: 20595 - DNA, 1587 bp, synthetic construct; identical to SEQ ID NO: 20575
  misc_feature 1..1587: note = source = /note="Description of Artificial Sequence: Synthetic coding sequence"
  source 1..1587: mol_type = other DNA

SEQ ID NO: 20596 - DNA, 1587 bp, synthetic construct
  misc_feature 1..1587: note = source = /note="Description of Artificial Sequence: Synthetic coding sequence"
  source 1..1587: mol_type = other DNA
atgctgcttgccgtgttatactgcctgttgtggagtttccagacctcagccggtcacttccccagagcctgtgttagttctaaaaacctgatggaaaaggagtgttgccccccgtggagcggcgacaggagcccttgcggacagctgtcgggtcgggggtcatgccagaacatcctcctgtcaaatgcaccactcggccctcagtttccgtttacaggagtcgacgatagagagtcctggccttccgtgttctataatagaacctgtcagtgcagtgggaatttcatgggattcaactgcggaaactgcaaattcggtttctggggtccgaattgcacggagcggaggctactcgtcaggaggaatatctttgatctgtccgctcctgagaaagacaaattctttgcttacttaacgctggccaagcacaccatatccagcgattacgtgatccctatcgggacctacggacagatgaagaacggtagcacgccgatgttcaatgacatcaatatctatgacctcttcgtgtggatgcactactacgtctccatggacgctctccttggcggctctgaaatctggcgggatattgattttgcacatgaggcccctgccttcctgccgtggcataggctcttcttactgagatgggaacaggaaattcagaagcttacgggcgacgaaaatttcaccataccttattgggattggagagacgcggagaagtgcgacatttgcacagatgaatacatgggcggccagcatcccaccaatcccaacttactttcaccagcctctttcttttctagttggcagatcgtttgcagtcgactggaagagtataactcacaccagtctttgtgtaacggcacacccgagggacccctccgaaggaacccaggcaatcacgacaaatccaggactcctaggctcccatcatccgccgatgtcgagttttgtctgtccttaacccaatacgaaagtgggagcatggacaaggcagccaacttttctttcagaaacactctcgaagggtttgcctcccctttgacaggaatagccgatgcatcacagagctccatgcacaatgcattgcacatttacatgaacggtactatgagtcaagtgcagggctcggccaatgacccgatcttcctgctgcatcatgcgtttgttgattctatcttcgaacagtggttgcggagacaccgaccgcttcaggaggtttaccccgaggccaatgcgcctattggtcataatcgcgaatcatacatggtcccatttatccccctgtataggaacggcgatttctttatttcctctaaagatcttgggtacgactactcatatctgcaggactcggatccagatagcttccaggactacattaagtcttacctggagcaggctagccgtatttggagttggttgcttggagctgcaatggtcggggcagttttaacagctctacttgccggcctggtttccctactttgtaggcataaacgtaaacaattgcccgaagagaaacaaccactgctgatggagaaggaagattaccacagcctctaccaaagccatctg

SEQ ID NO: 20597 - DNA, 1587 bp, synthetic construct
  misc_feature 1..1587: note = source = /note="Description of Artificial Sequence: Synthetic coding sequence"
  source 1..1587: mol_type = other DNA
atgctgctggctgtcctttactgtcttctctggtcatttcagaccagcgcaggccacttccctcgagcctgcgtcagctcaaaaaacctgatggagaaggaatgttgtcccccatggagcggcgataggagcccttgcggccagttgagtggacgcggcagctgtcagaacatacttttgtcaaacgctccattggggccacaattcccctttactggagtcgacgacagggagtcatggccatctgtcttttacaaccgcacttgccaatgctcaggtaatttcatgggttttaactgtggtaattgcaagttcggtttctggggaccaaactgcactgaacggaggctgctggtccgccgcaatatcttcgatctgagtgcacctgaaaaagataaattcttcgcctacctgactctcgccaagcatacaatatcatccgattatgtgattccgatcggcacctacgggcagatgaagaatggctccacccccatgttcaacgacatcaacatttacgatctgtttgtgtggatgcactactatgtgtccatggatgccttgctcggagggtcagagatatggcgggacatcgactttgctcatgaggctccagcttttctgccttggcaccggttgttcctcctcaggtgggagcaggaaatccagaagctgactggagacgagaactttaccatcccctactgggattggcgggacgctgaaaaatgtgacatttgtacagatgagtacatgggaggtcagcacccaaccaacccaaacctgctgtcacccgcatccttcttttcaagttggcaaattgtctgttctaggctggaggagtataacagccaccaaagcctgtgtaatggaacccctgagggacccctgagaagaaaccccggcaatcatgataaatcacgcactcctcgccttccgagttctgctgacgtggagttttgcttgtcactgacccagtacgaaagcgggtctatggacaaggccgcaaacttctcttttcgcaacaccctggaaggctttgcatcacccttgaccggaatcgcagacgcaagtcagagctctatgcacaacgccctgcacatctacatgaacggaaccatgagccaggtgcagggaagcgctaacgatccaatcttcctgttgcaccacgcgttcgtagactcgatctttgagcaatggctcagaaggcacagaccactccaagaagtgtaccccgaggcaaacgctccaatcggccacaatagagagtcttacatggtacccttcatccctctctacaggaatggagatttcttcatcagtagtaaggaccttggttacgattactcatacctccaagactctgatcctgactcatttcaggactacattaagagctatctggagcaagctagtcgcatctggagttggctcttaggcgccgctatggtgggagctgtcctgactgccctgttggcaggcctggtgtctctcctgtgcaggcataaacgcaaacagctgcccgaagagaagcagccactgctgatggaaaaggaagattaccattctctctaccagagccatctg

SEQ ID NO: 20598 - DNA, 1587 bp, synthetic construct
  misc_feature 1..1587: note = source = /note="Description of Artificial Sequence: Synthetic coding sequence"
  source 1..1587: mol_type = other DNA
atgcttctggcagtgctttactgtctcctgtggtcttttcaaacttcggccggacattttcccagggcatgtgtttcatctaaaaaccttatggagaaggagtgttgtcccccttggtcaggcgaccggtcaccctgtggccaactgtccggacgtggatcgtgtcagaacatactcctttcaaacgcacctctcggacctcagtttccattcactggagtggatgacagagaaagctggccatcggtgttctacaacaggacttgtcaatgtagcgggaatttcatgggattcaactgcggaaactgtaagtttggattttggggacctaattgtaccgagcgcagacttcttgtgcggcggaacatctttgatctgtcagcacccgaaaaggataagttctttgcataccttacccttgcaaagcataccatttcgagcgattatgtcattcccatcggcacctacggtcaaatgaagaatggaagcactcccatgttcaatgatatcaatatctacgatctttttgtctggatgcattactacgtgtcgatggatgcactgttgggtggatccgaaatttggagagacatcgattttgctcatgaggcacctgcatttcttccttggcatagactgtttcttcttagatgggaacaagaaatccaaaagctgaccggagatgagaactttactattccatactgggattggcgcgacgcggaaaagtgtgatatatgcacggatgagtacatgggaggacagcatccaactaaccctaatcttttgtcaccagctagcttcttttcctcgtggcagattgtgtgtagccgtttggaagagtacaactcccatcaatctctctgtaacggcaccccagaaggacccctcagacggaaccccggtaaccatgataagtcgcgaaccccccgcctgccttcatccgcagacgtcgaattctgtctgagcctcacccagtacgagtcgggatcgatggataaagcagcaaacttcagctttcgaaatacccttgaaggattcgcatcccccctcactggaattgccgacgcctcacagtcgtcgatgcataatgcgctgcacatttacatgaacggcaccatgagccaggtgcagggcagcgctaacgatccaatattcctgctgcatcacgccttcgtggattcgatttttgaacagtggcttagacgacaccgtccgctccaagaggtgtaccccgaggcgaatgcacctattggacacaacagagaatcgtacatggtcccttttatccctctttataggaacggtgatttcttcatatcctccaaggacctgggttatgattactcgtacctccaagattcggatcctgatagctttcaggattacatcaaatcgtacctcgaacaggcgtcccgcatttggtcgtggttgcttggagcagcgatggtgggtgcagtgcttactgcactgctcgcgggtttggtttcccttctttgccgccataaacggaagcagctcccggaggaaaaacagcctttgctgatggagaaagaagattatcactccctgtatcaatcgcatctc

SEQ ID NO: 20599 - DNA, 1587 bp, synthetic construct
  misc_feature 1..1587: note = source = /note="Description of Artificial Sequence: Synthetic coding sequence"
  source 1..1587: mol_type = other DNA
atgctgcttgccgtgctttattgtctcctgtggtccttccaaacctcagccggacattttcctagagcctgcgtttcgtccaagaacctgatggaaaaagagtgttgcccaccctggtctggtgatcggtcgccttgcggccaacttagcgggagaggcagctgtcaaaacatcttgctgtcgaatgcacctctgggaccccaattcccctttaccggagtggatgatagagagagctggccatcggtcttttacaatcgaacctgtcaatgttcgggaaactttatggggttcaattgcgggaattgtaagtttggtttttggggtcctaattgtaccgaacgacggttgttggtgcgtcgaaacatttttgatctttcggcaccagaaaaggacaagtttttcgcatatcttaccctggcaaagcacaccatcagctcggattacgtgatccccattggtacttacggtcaaatgaaaaacgggtcgactcccatgtttaatgacattaacatttacgaccttttcgtgtggatgcactactatgtgtcgatggacgccctgctcggtggttccgaaatctggagagacattgactttgcacatgaagccccggccttcctcccatggcatcgcttgtttcttcttcgatgggaacaagaaattcagaagctcaccggcgacgagaactttactattccgtattgggattggagggatgcggaaaagtgcgacatttgcaccgatgagtacatgggaggacaacacccaacgaatcctaacctgttgtcacccgcctcctttttctcgtcgtggcaaatcgtgtgttcaagacttgaggaatacaactcccaccaatcgctttgcaacggcactcctgagggccctctcagacgtaatcccgggaaccacgataaaagcagaactcctaggttgccaagctccgcagacgttgaattttgtttgtcacttacccaatacgaatcgggcagcatggataaggctgccaacttttcctttcgaaacactctggagggttttgcaagcccgcttaccggaattgcagatgcaagccagtcgtcaatgcataatgcactgcacatctacatgaacggtactatgtcgcaagtgcaaggaagcgccaatgaccctatctttcttcttcaccatgcattcgtggactcgatctttgagcagtggctgcgccggcatagacctctgcaggaagtctatcctgaagcaaatgctcctataggacataatcgagaaagctacatggtcccatttatcccgctgtacagaaacggtgactttttcatatcgtccaaagacctgggctacgattactcgtatctccaggattccgatccagattcatttcaggactacattaagtcctaccttgaacaggcctcgcggatttggtcatggcttttgggagcagcaatggtgggcgcagtgctcaccgcactcctcgcgggtcttgtgtcgcttctgtgtagacacaaaaggaagcagcttcctgaagaaaagcaacccctgctgatggagaaggaagattaccattcgctgtaccagtcgcatctg

SEQ ID NO: 20600 - DNA, 1587 bp, synthetic construct
  misc_feature 1..1587: note = source = /note="Description of Artificial Sequence: Synthetic coding sequence"
  source 1..1587: mol_type = other DNA
atgcttctagccgtgctctactgcctcctctggtcctttcagacatcagctggacacttccctagggcatgcgtgagttctaagaatttgatggagaaggaatgttgtcccccatggtccggagatcgctctccttgtgggcaattaagtggcaggggttcgtgccagaacatcctcctgagtaacgcacctctgggccctcagttccctttcaccggcgttgatgatcgagagtcatggccgagtgtgttctacaatcggacttgccagtgcagtgggaactttatggggtttaattgtggcaattgtaaattcgggttctggggccccaactgtactgagaggaggctactagtgaggaggaacatctttgacctgagcgctccagagaaagataaatttttcgcttacctcaccctcgctaagcacactatctcgagtgattatgtgattcctatcgggacatatggtcagatgaagaacggatccacacctatgtttaacgacataaacatttatgatctcttcgtgtggatgcactattacgtctcaatggacgccttactcggaggttctgagatctggcgcgacatcgactttgcacacgaagcacctgcatttttgccatggcacaggctgttcctgcttcgatgggaacaagagattcagaagctgacaggcgacgagaatttcaccattccatactgggactggcgagatgccgagaagtgcgacatctgtactgacgagtatatgggaggacagcaccccaccaacccaaatttgctgtccccggcttccttcttttcctcttggcagatcgtctgctctcgcctcgaagagtataactctcaccagagcctatgtaatggaactcctgaggggccattgcggagaaaccctggcaatcacgacaaatctagaacgcctaggctgcctagttctgcggatgttgaattttgcctgtcgttgacccagtatgagagtggcagcatggacaaagcagctaatttctcattcaggaacacactggaaggcttcgcctctccccttactggaatcgcagatgcctctcaaagttcaatgcacaatgcactgcatatttacatgaatggcaccatgtcgcaggtccagggatcggcgaatgatcctatctttttgttacaccacgcatttgtggatagcatctttgaacagtggctccggagacacagaccgctacaggaagtgtaccccgaggcaaatgcgccaattggacacaaccgtgagtcttacatggtgcccttcattcctctgtacaggaacggcgactttttcatttcctctaaagatttaggttatgattactcatatctccaggactcggacccggattcatttcaggattacattaaaagttacctcgagcaggcttcgagaatttggtcttggctcttgggcgccgctatggtgggcgcagtcctgactgcccttcttgccggtcttgtgagcctgctgtgtcgccataagcgtaagcaactccccgaagagaagcagcccctcctgatggagaaggaagactatcatagtctttatcagtcccattta

SEQ ID NO: 20601 - DNA, 1587 bp, synthetic construct
  misc_feature 1..1587: note = source = /note="Description of Artificial Sequence: Synthetic coding sequence"
  source 1..1587: mol_type = other DNA
atgttgttagcagtcttatattgtttattgtggtcatttcagacatctgctggtcattttccacgcgcttgcgtgagttccaagaacttaatggagaaagagtgctgtccaccgtggtcaggggatcgctcaccttgtggccaactttctggcagaggctcatgtcaaaatattttgttgagcaacgctccgctcggcccacagtttccgttcactggcgttgatgacagagagtcctggccatccgttttttataaccggacgtgccagtgttctgggaacttcatggggttcaactgcggcaattgcaagtttggcttttgggggccgaactgcacagaacgacgacttttggtgcgaagaaatatttttgatttatcagcaccggaaaaggacaaatttttcgcttatttaacactcgcgaagcatacaattagtagtgactatgtcatcccaattggaacatatggacagatgaaaaatggcagtacgccgatgtttaacgatataaatatttatgacctgtttgtctggatgcattattatgtttcaatggacgcgttgttgggaggcagcgaaatctggagagacattgattttgcacatgaagcacctgcgttcttaccgtggcaccgattgtttcttcttcgttgggaacaggaaatccaaaaactcacaggtgacgagaatttcacaatcccgtactgggactggagggacgccgagaaatgcgatatttgtacggatgaatacatgggagggcagcacccaacaaatccaaacttattgtccccggcgtcgtttttttcatcgtggcaaattgtctgctcccgactagaagaatataactctcatcagagcctctgcaacggcacgccggaaggaccgctgcgccgtaatccgggaaaccatgacaaatcgagaacacctcgtttaccgagctcagcggatgtggaattctgtttgtcattgacccagtatgaatctggctcaatggataaagcggcaaacttctcatttaggaatacgttagaggggttcgcgtcgcctcttacaggcattgccgacgcatcacagtctagcatgcacaatgcgctgcatatttatatgaacggaacaatgtcacaagtgcagggcagcgccaatgatccgattttcctgttgcatcatgccttcgtcgactcaattttcgagcaatggttgcgaagacatagaccactgcaagaggtctacccggaagccaatgcaccgatcggtcataaccgtgaaagctatatggttcctttcattccgctctatcgaaatggcgactttttcatttcaagtaaggaccttggctatgactatagctatcttcaggattctgacccggacagtttccaagattacatcaaatcttatttagagcaagcgagccgcatttggagctggctcctcggcgctgcgatggttggagcagtgttaactgcactcctggctggcttagtcagcttgctgtgtagacacaaaaggaagcaacttccggaagagaagcagcctcttttgatggaaaaagaggactaccattctttatatcaatcacacctt

SEQ ID NO: 20602 - DNA, 1587 bp, synthetic construct
  misc_feature 1..1587: note = source = /note="Description of Artificial Sequence: Synthetic coding sequence"
  source 1..1587: mol_type = other DNA
atgttactagccgttctgtattgtttgttatggtcgtttcagacttctgcaggccattttcccagggcctgtgtgtcatccaaaaatttgatggagaaggaatgttgtcccccttggagtggggatcgcagcccatgtggccaattatcgggccgggggtcttgtcagaatattctgctctccaacgctcccctcggcccgcagttccctttcaccggcgtcgacgatcgcgagtcctggccaagtgttttttataatcggacttgccagtgtagtggaaacttcatggggttcaactgcggaaactgcaagttcggcttttggggccctaattgcacagaacgtaggttactggtgcgccgaaacatctttgatctttctgctccggaaaaggataaatttttcgcctatctgacgctcgccaaacacactattagttccgactatgtgattcccatcgggacctacggacaaatgaagaacggctccacgcccatgtttaatgatatcaatatttacgatctgtttgtctggatgcactactacgtctccatggacgcactgctagggggctctgagatctggcgcgatatagactttgcgcatgaagcacccgcattcctgccctggcatcggctgttcctgctgaggtgggagcaggagattcaaaaactgacaggtgacgaaaattttacaatcccttactgggactggagggatgccgagaagtgcgacatctgcacggacgagtacatgggagggcaacatcccaccaatcctaacttgctgagtccggcttctttttttagctcctggcagatcgtctgctctcggctcgaggaatataactcccaccaatctctctgtaatggaacaccggagggcccattgcggcgcaacccaggtaaccacgataagagtcgcaccccacgtctgccctcatccgcagatgtggagttttgtctcagtttgacacaatatgagtccggtagcatggataaggcggccaacttctcttttagaaatactttggagggcttcgcgtccccgctaaccggcatcgcagacgcaagccagagtagcatgcataacgccctacacatatacatgaacggcaccatgtcgcaggtgcagggctcagccaacgacccgatatttttattgcaccacgcatttgttgacagcatcttcgaacaatggctgcggcggcaccggccactccaagaggtttacccagaggccaatgcccccatagggcacaatagagagagctatatggtgcccttcatcccactgtataggaatggcgacttcttcattagttccaaagatctgggctacgactattcatatctgcaggacagtgacccggattcattccaagattatataaagtcttacttagagcaggcttctcggatatggtcctggctgctgggcgctgcaatggtcggtgcagtgttgaccgctctgctggcgggactggtctccctgctttgtaggcataaacggaaacaattacccgaggaaaaacagcctctactgatggagaaggaggactaccattccctttatcagagtcacctt

SEQ ID NO: 20603 - DNA, 1587 bp, synthetic construct
  misc_feature 1..1587: note = source = /note="Description of Artificial Sequence: Synthetic coding sequence"
  source 1..1587: mol_type = other DNA
atgctccttgcggtgctgtactgccttttgtggagctttcagacgagcgcaggccatttcccgagagcctgcgtctcctcaaaaaacctgatggaaaaggaatgctgccctccttggtcgggtgatcgctccccatgtggacaactgtcgggaagaggatcctgtcaaaatatcctcctctccaacgcgcctctgggacctcagttcccgtttaccggagtggatgacagggagagctggcctagcgtcttctacaaccggacctgccaatgctcaggtaatttcatgggcttcaactgcggaaattgtaagtttgggttctggggaccgaattgcacggagagaaggctgctcgtacgccgcaacattttcgacctgtcggcgccagagaaggataaattcttcgcgtacttgacgctcgccaagcacaccatcagcagtgactacgtgatcccgatcggaacctacggtcagatgaagaacggctccaccccaatgttcaacgacatcaacatctacgacctgtttgtgtggatgcattactacgtgagcatggatgcgctgctcggcgggtccgagatctggagagatatcgacttcgcccatgaggcgccagcatttctcccgtggcataggctgttcctgttgcgatgggagcaagagattcaaaagctcactggcgatgagaacttcaccatcccatactgggattggcgcgacgcggaaaaatgcgacatttgtaccgacgagtacatgggcggacagcatccgaccaaccccaacctgctgtcgccggcatctttcttctccagctggcaaatcgtgtgctctcggctggaagaatacaattcgcaccagtctctgtgtaacgggactccggaaggcccgctccggcgcaatccgggaaaccacgacaagtcacgcaccccgaggctgccttcatcagcggacgtcgagttctgcctgtcgctgactcaatacgagagcggatccatggataaggcagccaacttctcgtttagaaacactctggaaggattcgcttccccactgaccggcatcgccgacgcgtcccaatcgtcaatgcacaatgctctccatatctacatgaacggaaccatgtcacaagtgcagggatctgcaaacgaccccatcttcctgctgcaccacgcgttcgttgattccatcttcgaacagtggttgaggcgccaccgcccgctccaggaagtgtacccggaggccaatgcgcctatcggacataacagagagtcctacatggtcccgtttatccccctctaccgaaatggagacttctttatctcatcaaaggatcttggctacgattacagctacctgcaggatagcgatccggattcgttccaggactacatcaaatcctacctcgaacaggcatcgcgcatctggtcctggctgctgggagccgcaatggtgggagccgtgctgaccgcacttctggccggactcgtgtctctgctgtgccgccacaagcgcaagcagctgccagaggaaaaacagccgcttctgatggagaaagaggattaccactcgctgtaccagagccacctg

SEQ ID NO: 20604 - DNA, 1587 bp, synthetic construct
  misc_feature 1..1587: note = source = /note="Description of Artificial Sequence: Synthetic coding sequence"
  source 1..1587: mol_type = other DNA
atgctgctcgccgttctttattgtctcttgtggtccttccagacatcggcgggacatttcccacgcgcctgtgtcagctccaagaatcttatggagaaggaatgttgccccccatggtccggcgaccggtcgccttgcggccagctgtcagggaggggctcatgtcagaatattctgcttagcaatgctcctttgggcccacagtttcccttcactggagtggacgatagggaaagttggccatcagtgttctacaacagaacctgtcagtgctccgggaattttatgggcttcaactgcggcaattgtaagtttgggttttggggccccaattgcaccgagaggagactccttgtccgtcggaacatctttgatctgtctgccccagaaaaagataaattctttgcctacctgactttggctaaacacacaatctcctccgactacgtcatcccgatcggcacatacggtcagatgaagaatggatcaacacctatgtttaatgacataaatatctatgacctgttcgtgtggatgcattattatgtgagtatggatgccttgctgggaggctccgagatctggcgagatatcgactttgcccatgaggctcctgctttcctgccctggcaccggctcttcctactgcggtgggagcaagagattcagaagctcaccggagacgagaactttactattccttattgggactggcgcgacgcagagaagtgtgacatttgtaccgacgaatacatgggcggacaacaccctaccaatcccaatctgctctcccccgctagcttcttttcatcgtggcagattgtatgtagccgcttagaggagtacaactctcaccagagcctgtgtaatggaaccccagaaggaccactgcgccggaatcccggaaaccacgacaaatctcggaccccccgcttgccctcctctgcagacgtggagttttgcctcagtctaactcaatacgagagcggctccatggataaagccgcaaatttttcgttccggaacacactcgagggatttgcctccccccttaccggcatcgccgatgcatcccagtcttcaatgcacaatgcacttcatatctatatgaacggtacaatgtctcaggtacagggttccgcaaacgacccgatcttcctgctgcaccacgcttttgtcgactctattttcgaacaatggctgcgccgtcaccgacccttgcaggaggtgtacccagaagctaacgccccgattggacataaccgcgagagctacatggtgcctttcatccccctttatagaaacggagatttcttcatcagctccaaggatctgggctatgattactcatacttgcaggacagcgatcctgattctttccaggactatatcaagagctacctggaacaggccagccgaatatggtcatggctgctgggggcggctatggtgggcgctgtgttaaccgcgctactggcaggtctggtgtccctcttgtgcaggcataaacggaaacaactgccagaggaaaaacagcccctcctgatggaaaaggaagattaccattctttgtatcaatcacacctc

SEQ ID NO: 20605 - DNA, 1587 bp, synthetic construct
  misc_feature 1..1587: note = source = /note="Description of Artificial Sequence: Synthetic coding sequence"
  source 1..1587: mol_type = other DNA
atgctgctggccgtcctctactgcctactatggagcttccagaccagcgctggacacttccctcgcgcttgcgtctctagtaagaacctgatggagaaagaatgttgccctccatggtcgggtgacagaagcccgtgcggacaactgtccggtcgaggtagttgccaaaacattctgctttctaacgccccgctgggaccacagttcccctttactggcgtcgacgatcgcgagagctggccttccgttttttacaaccggacgtgccagtgttctgggaacttcatgggcttcaattgtggcaactgcaagttcggattttggggcccaaattgcactgaaaggagactgctcgtaagaagaaacatattcgatctcagcgctcccgagaaggacaaatttttcgcttacttgactctcgccaaacacaccatttctagcgactacgttatcccgataggtacttacggccagatgaagaatggatccacgcctatgtttaacgacattaatatctatgatctgttcgtgtggatgcactactacgtgtccatggacgctctgctgggaggaagtgagatttggagagatatagacttcgcacacgaggcaccggcatttctgccatggcaccgcctttttcttctgcgatgggagcaagagatccagaagctgaccggagatgaaaacttcacgatcccatactgggattggcgcgacgcagagaaatgcgacatttgcacggacgaatacatgggaggacagcatccaactaaccccaacttactctccccagccagtttcttctcgagctggcagattgtatgctctcgtcttgaggagtataatagtcatcagtcgctgtgtaatggtacacccgagggacctctccgcaggaacccaggtaatcatgacaaatcgaggacccccagattaccctcatccgcggatgttgagttttgtctgtccctaacgcagtacgaatcgggctctatggacaaggccgccaattttagttttcggaatactctggagggcttcgcctcgcccttgactggcatcgccgatgcctcgcagtcgagcatgcataacgccttgcatatttatatgaatggaaccatgagccaggtgcagggctcggctaatgacccaattttcctgctacatcacgcattcgtggatagcatatttgagcagtggcttcgccggcaccgcccgctacaggaggtttatccggaggccaatgcccccattggtcacaatcgcgaatcgtatatggttccgttcatccccctctacagaaatggagatttcttcatcagcagcaaggacttgggatacgattattcctacctacaagacagcgacccggattccttccaagattacattaagtcgtatcttgaacaggcaagtcggatttggagctggctcctgggcgcagccatggttggcgcagtgctgacagccttgctggcaggactggtgtctctgctgtgccgtcacaagcggaagcagttgccagaggaaaaacagcccttgctaatggagaaggaggactaccacagcctatatcaatcacacttg

SEQ ID NO: 20606 - DNA, 1587 bp, synthetic construct
  misc_feature 1..1587: note = source = /note="Description of Artificial Sequence: Synthetic coding sequence"
  source 1..1587: mol_type = other DNA
atgcttttagctgtattatattgtttactttggtcttttcaaacttcagctgggcattttcctagagcttgtgtttcatcaaaaaatcttatggaaaaagaatgttgtccaccatggtctggtgatagatccccttgtggacaattatcaggaagaggatcatgtcaaaacattttactttcaaatgctccattaggaccacaattcccatttactggtgttgatgatagagaatcatggccttctgtgttttataatagaacttgtcaatgttctggaaattttatgggatttaattgtggaaactgtaaatttggattttggggtccaaattgtacagaacgtagattattagttagaagaaacatttttgatttatcagctcctgaaaaagataaattttttgcatatttaacattggctaaacatactatcagtagtgattacgtcattccaattggaacatatggacaaatgaaaaatggatcaacaccaatgttcaatgatattaatatttacgatctttttgtttggatgcattattatgtttcaatggatgcattacttggtggttcagaaatatggagagatattgattttgctcatgaagcacctgcatttttaccatggcatagactttttttattaagatgggaacaagaaattcagaaactaaccggtgatgagaattttacaattccttattgggactggagagatgcagaaaaatgtgatatttgtacagacgaatatatgggtggacaacacccaactaatcctaaccttctttcaccagcaagtttcttttcatcatggcaaattgtttgttcaagattagaagaatataactctcaccaatctttgtgtaatggaacccctgaaggaccattaagacgtaaccctggaaatcacgataaatctagaacaccaagacttccttcaagtgccgatgttgaattttgtctatctcttactcaatatgaaagtggttctatggacaaagcagctaatttttcatttcgaaatactttagaagggtttgcttcaccattaactggaattgcagatgcatcacaatcttcaatgcataacgcattacatatttatatgaatggaactatgtctcaagttcaaggatcagcaaatgatccaattttccttttgcatcatgcatttgtagactctattttcgaacaatggcttagaagacatcgtccattacaagaagtttatccagaagcaaatgcaccaattggacataatcgagaatcttatatggttccatttattccattatatagaaatggagatttttttatatcatcaaaagacttaggttatgattattcgtatcttcaagatagcgatccagatagtttccaggattatattaaaagttatttagagcaagcatcaagaatttggtcttggcttttaggtgctgctatggttggtgctgttttaacagctttgttagctggattagttagtcttttatgtagacacaaacgaaaacaattgccagaagaaaagcaacctttacttatggaaaaagaagattaccatagtttgtaccaaagtcattta

SEQ ID NO: 20607 - DNA, 1587 bp, synthetic construct
  misc_feature 1..1587: note = source = /note="Description of Artificial Sequence: Synthetic coding sequence"
  source 1..1587: mol_type = other DNA
atgttgctcgccgttctgtactgcctcctgtggtcgttccaaacatcagcgggccactttccgcgggcctgcgtgtcaagcaaaaatctcatggaaaaggagtgctgtcctccctggtccggcgatcgatccccatgtggacagctctcgggtcgcggttcttgccagaacatcctgctaagcaatgcacctctggggccccagtttcccttcaccggtgtggatgatagagagagctggcccagtgtgttttacaaccgcacatgccagtgctccggaaacttcatggggtttaattgtgggaattgtaagttcggtttttggggacccaattgcacagagagaaggctgctggtgcgaaggaacatcttcgacctaagcgcgcccgagaaagataagttctttgcatacttgaccctagccaaacacacgatctcctcagattatgtaattccaattggaacttacgggcagatgaagaatgggtcaaccccaatgttcaacgatatcaatatatacgatctctttgtgtggatgcactattatgtcagcatggacgcgctccttggcgggtcagaaatatggcgagacatcgactttgcacatgaagccccagcgttcttgccctggcaccggctcttcctgctgagatgggaacaggagattcagaaactgactggcgatgaaaattttactatcccatattgggattggagggacgcagaaaaatgcgatatctgtaccgacgagtacatgggcggacagcacccaaccaacccgaatctcctgagtcccgcatcattttttagcagttggcaaatcgtttgcagtcgacttgaggagtacaattcccaccagtcactctgtaacgggactcccgaaggacccctgaggcggaacccaggtaatcacgacaagtctcggacacctaggctcccatctagtgctgatgtcgaattttgcctgtctctcacacagtacgaatccggctccatggacaaagcggcaaacttttcttttcgaaatacactcgaagggttcgcatcacctttgaccggcatagctgacgcctcccagtcctcaatgcataacgcgctccacatctacatgaatggaactatgagtcaggtgcaggggtctgcaaacgatcctattttcctgttacaccacgcttttgtggatagtattttcgaacagtggctgcgacgccaccgccctctgcaggaggtgtatccggaggcaaatgctccaatcggacataacagagaaagctatatggtgcccttcattccactgtaccggaatggggacttttttatcagtagtaaggacttggggtacgattatagttatctccaggactcggacccagattctttccaggactatattaagagttacctcgagcaagcctcgaggatctggagctggctgctgggagccgccatggtgggcgctgtccttaccgctctgttagctggcctcgttagcctgttgtgtcgccacaagaggaagcagcttcccgaagaaaagcagcccctgctgatggagaaagaagactatcattccctatatcagagccacctc

SEQ ID NO: 20608 - DNA, 1587 bp, synthetic construct
  misc_feature 1..1587: note = source = /note="Description of Artificial Sequence: Synthetic coding sequence"
  source 1..1587: mol_type = other DNA
atgttgctcgccgtgctctactgtctgctctggtcgttccagacgagcgcggggcactttccgcgggcgtgcgtgtcctccaagaatttgatggaaaaagagtgttgcccgccgtggtcaggcgatcgctcgccctgcggacaactctccggacggggatcgtgccagaacatcctgctgtccaacgcacctctcggcccgcagttcccgttcaccggagtggacgatcgcgaaagctggcccagcgtgttctataatcggacctgccagtgctctggaaacttcatgggattcaactgtggtaattgcaaatttggattctggggaccgaattgtaccgagcgcagactcctggtgcgaaggaacatctttgacttgtccgccccagaaaaggacaaattcttcgcgtacctgacccttgccaaacataccatctcatcggactatgtgattccgattggaacttacggccagatgaagaatggatcgactccgatgttcaacgacatcaacatctacgatctgttcgtttggatgcactattatgtgtccatggacgcgctgttgggaggatcagagatctggcgcgacatcgatttcgcacatgaggcaccggcattcttgccgtggcaccgcctgttcctgctgcgctgggaacaagagatccagaaactgacgggtgacgaaaactttaccataccatactgggactggcgcgacgcggaaaagtgtgatatctgcactgacgagtacatgggaggtcagcatcctactaacccgaaccttctctcgcctgcctcctttttctcgtcgtggcagattgtctgctccagactggaggagtacaactcgcaccagtccctgtgcaacggtaccccggaaggacctcttcgccggaacccaggcaatcacgacaagtctcgtaccccacggctgccctcgtcagcggatgtggaattttgccttagcctcacccagtacgaaagcggatctatggacaaggctgctaatttctcattcagaaacacgctcgaaggattcgcctccccgttgaccggcatcgcggacgcaagccagagctccatgcataatgccctgcacatatacatgaacggaactatgagccaggtccaggggtcggcaaacgatcctatcttcctcctccaccacgcctttgtggactcgatctttgaacaatggctgcgacggcaccggccgctccaggaagtctacccagaagccaatgcgccaattggacacaatcgcgagtcgtacatggtgccgtttatcccactgtaccggaacggtgacttctttatctcatccaaggacttggggtatgactactcctacctgcaggattccgacccggacagcttccaggactatatcaagagctacctggagcaagccagtcggatctggtcatggctgctgggagccgcaatggtaggtgcagtgttgaccgcgttgttggctgggctcgtctctcttctgtgccgccacaaaagaaagcagctcccggaagaaaagcagcctctgctgatggaaaaggaggattaccactcgctgtaccagtcccatctg

SEQ ID NO: 20609 - DNA, 1587 bp, synthetic construct
  misc_feature 1..1587: note = source = /note="Description of Artificial Sequence: Synthetic coding sequence"
  source 1..1587: mol_type = other DNA
atgcttctggcggtgctctattgcctcctctggtcgttccaaacttctgcagggcacttccctcgggcttgtgtgtcaagcaagaacctcatggaaaaggagtgttgcccgccctggagcggggaccggtcgccttgtggccagctttccgggcgcggatcatgccagaacatcctgctctccaacgccccactgggaccgcagttcccgttcactggagtggatgatcgcgagagctggccttcagtgttctacaaccgcacctgccagtgctccggtaatttcatgggattcaattgcggaaactgtaagttcggtttctggggacccaactgcaccgaaaggcgcctgcttgtgagacgcaacatctttgacttgtccgcaccagaaaaagataaatttttcgcatacctcactttggccaagcatactatctcgagcgattacgtgatcccgattggcacttacggacaaatgaagaatggttcaaccccaatgttcaatgacatcaacatctacgacttgtttgtgtggatgcactactacgtctcgatggacgcccttctgggtggctccgagatttggcgcgacatcgacttcgcgcacgaggcgccggccttcctgccttggcaccggctgttcctcctgaggtgggaacaggaaatccagaaactcactggcgacgagaactttaccatcccatactgggattggcgggatgccgaaaagtgcgacatctgcacggatgaatacatggggggccagcatccaactaacccgaatctgctgagtcccgctagctttttctcgtcgtggcaaattgtgtgctcacggctggaagagtacaactcgcatcagtcgctgtgcaatggaaccccggagggacctctccgcagaaatcccggcaatcacgataaatcgcgcactccgaggctgccatcaagcgccgatgttgagttttgcctgtccctgacgcagtacgagtcaggatcaatggataaggccgctaatttctctttcagaaacaccttggaagggtttgcatcgcctctgaccggaatcgccgacgcatcccaaagctccatgcacaacgcgctgcatatctatatgaacggaaccatgagccaggtgcagggaagcgcaaacgatccgatcttcctcctccatcatgcgttcgtcgactcaatctttgaacaatggctgcgacggcatcggccactccaggaagtgtacccggaggcgaacgccccaatcggccacaatcgcgaatcgtacatggtcccgttcataccgctttaccggaacggcgacttctttattagctcgaaggacctgggatacgactattcctacctgcaggattctgaccctgactccttccaagactacatcaagtcgtacttggaacaggccagccgaatctggtcctggttgctgggagctgctatggtcggagccgtcctcaccgccctgctggcgggcctggtgtcgctcctttgtagacacaaaagaaagcaactcccggaagaaaagcagccgctgctgatggagaaggaggactaccactccctctaccaatcacacctg

SEQ ID NO: 20610 - DNA, 1587 bp, synthetic construct
  misc_feature 1..1587: note = source = /note="Description of Artificial Sequence: Synthetic coding sequence"
  source 1..1587: mol_type = other DNA
atgttgctggccgtgttatattgcctgctttggagcttccagacctccgcgggtcatttcccacgggcgtgtgtgtcatccaagaacctgatggaaaaagaatgctgccctccttggtctggcgaccgttctccatgtggacagttgagtgggcgtgggtcatgccaaaacatcctcctgagtaacgcaccgctcggtcctcagtttccttttactggggtggacgacagggaaagctggccatccgtgttctacaatagaacttgccagtgttccggcaactttatggggttcaattgtggaaactgtaagttcgggttctggggccccaattgtactgaaaggagactgctcgtccgccggaacatttttgacctgtcggcgcccgagaaagataagttctttgcctacttgaccctcgccaaacacacgatctctagcgactatgtcatcccaattggaacctacggccagatgaagaatggttccacgcctatgtttaatgacattaacatctacgatctgtttgtgtggatgcattactacgtgtctatggatgccctgttgggcggctctgaaatatggagagatatcgactttgctcatgaggcccctgctttcttgccttggcacaggctttttttgctccgatgggagcaggaaatccaaaaacttactggtgatgaaaattttacgatcccatactgggactggcgggacgccgagaagtgcgacatctgtaccgacgaatatatgggtgggcaacaccccacaaacccgaacctcctgagcccagcgtccttcttcagtagctggcagatcgtgtgctctaggctcgaggagtataatagccaccaatcactgtgcaacgggactcctgaggggcctcttagacggaatcctggaaaccatgacaagtctcgcactcctcgtctcccgtcaagcgctgatgttgaattttgcctgtcgcttacccagtatgaaagcggatccatggacaaagccgccaattttagcttccgcaacaccctagaaggattcgctagccctctgaccgggatcgctgacgccagccaaagctccatgcataacgccctccatatctacatgaatggtacaatgtcgcaggtgcaggggtccgccaacgatcccatattcctgttacaccacgccttcgtggattccatattcgaacaatggctccggagacaccgccctctgcaggaagtgtatcccgaggctaacgcccccattggccacaaccgagaatcttacatggtgcctttcatccccctgtaccggaacggggacttttttatctcttccaaggatctgggatatgactattcctacttgcaggatagcgaccctgactcgttccaagactatataaagtcctatctggagcaggcatctagaatttggtcttggctgctgggcgccgctatggtgggggctgtgctgacagctcttctggcaggccttgtctcacttttgtgccgccataagcgtaagcagctccctgaagaaaaacagccattattgatggaaaaagaggactaccacagtctgtaccagtcacacctc

SEQ ID NO: 20611 - DNA, 1587 bp, synthetic construct
  misc_feature 1..1587: note = source = /note="Description of Artificial Sequence: Synthetic coding sequence"
  source 1..1587: mol_type = other DNA
atgcttcttgcagtgctttactgtcttttgtggtcgtttcagacttccgcaggccatttcccaagagcgtgcgtgtcctcgaagaacctcatggaaaaggaatgttgtccgccctggtccggtgaccgttcgccttgcggtcagctgtcgggccggggatcgtgtcagaatatccttctctcgaatgcaccactgggcccccagttcccatttaccggagtcgacgaccgggaatcctggccctccgtgttttacaacagaacgtgccagtgtagcggtaacttcatgggattcaattgcgggaattgtaagttcggtttctggggacctaattgcactgaacgtcgtttgctcgtgcgaagaaatatcttcgatctgtcggcccccgaaaaagataagttttttgcctatcttactcttgccaagcacactatctcatccgactatgtcattcccatcggcacttacggccaaatgaaaaacggctcgaccccaatgttcaacgatatcaacatctacgacctttttgtgtggatgcactactacgtctccatggacgcacttttgggaggatcagaaatttggagggatattgatttcgcccatgaagcacctgcgtttctgccatggcaccggctttttcttctgaggtgggagcaagagatccagaagctcaccggtgatgaaaacttcaccataccttactgggattggagggatgcagagaagtgtgacatctgcactgatgaatacatgggaggacaacacccgactaatcctaaccttctgtccccagcatcgtttttctcctcatggcaaatcgtgtgttcgcgcctggaagagtacaattcgcatcagtcgctttgtaatggaacccctgagggtccactgaggcgcaaccccgggaatcatgataagagccggacccctagacttcctagcagcgcggacgtggaattctgtctgtccctgacgcaatacgagtccggctccatggataaggcagcaaatttctcatttaggaatacgctggagggttttgcttcaccacttacgggtattgcagatgcaagccagtcatccatgcataacgcactgcatatctacatgaatggtactatgtctcaagtgcaaggatctgccaacgatccgatatttcttttgcatcatgcttttgtggactccatttttgaacaatggctccggagacacagacctcttcaggaagtgtaccccgaagctaacgcgccaattggtcataatagagagtcatacatggtgccgtttatccccctctaccgaaacggagacttcttcatttcgtcgaaggacctcgggtacgattactcctacctgcaggactcggacccggactcattccaagattacatcaaatcgtatctggaacaagcgtcacgaatttggtcgtggcttcttggagcagcgatggtgggagcagtgcttaccgcgcttctcgccggtctggtcagccttctttgtcgtcataagcgcaaacaactgcctgaagaaaagcaaccactgcttatggagaaagaagattaccattccctgtaccaatcgcacttg

SEQ ID NO: 20612 - DNA, 1587 bp, synthetic construct
  misc_feature 1..1587: note = source = /note="Description of Artificial Sequence: Synthetic coding sequence"
  source 1..1587: mol_type = other DNA
atgctgctggcagtgctctactgccttctttggtcttttcagacttcggctggacacttcccgcgggcctgtgtctcgtcgaagaacctgatggaaaaagaatgttgcccaccgtggtcgggcgatagaagcccttgcggacaacttagcggaagaggatcttgccagaacatcctgctttccaacgcgccactgggaccgcaatttccatttactggggtcgatgaccgcgagtcgtggccatccgtgttctacaaccgcacttgccagtgctcgggaaatttcatggggtttaactgtggaaattgcaagtttggattctggggacccaactgcactgagaggcggttgctcgtccggcgcaacatcttcgacctctctgctcccgagaaggataagttttttgcttacctgactctcgccaagcatacgatcagctccgactacgtcatcccgatcggtacctacggacagatgaagaacggatccaccccgatgttcaatgatatcaacatctacgatctgttcgtgtggatgcattactacgtgtcgatggacgctcttctgggaggatccgaaatctggcgcgatatcgacttcgcacacgaagccccagccttcctgccgtggcacagactgttcctgctgcgctgggagcaggaaatccagaagttgacgggagacgaaaacttcaccattccgtactgggactggagagacgccgaaaaatgtgatatctgcactgacgaatacatgggaggtcagcacccgactaatccgaaccttctctcgcctgcgagcttcttttccagctggcaaatcgtctgctccaggctcgaagaatacaattcgcatcagtccttgtgcaatgggactcctgaaggaccgttgcggcgcaatccaggcaaccatgacaagtcccgcactccgagactgccctcatcggccgacgtcgagttttgcctgagccttacccagtacgaatcaggatcaatggacaaggccgccaacttttcgtttcgcaataccctggaggggtttgcgagcccgctcaccggaatcgcagacgccagccaatcatccatgcacaacgccctgcacatctacatgaacggcactatgtcacaggtgcagggatcagcaaacgacccgattttcctgctccaccacgcgttcgtggactcaattttcgagcagtggctgcgtaggcacagaccgctgcaggaagtgtatcccgaagctaatgccccgatcggacataaccgagaatcgtacatggtgcctttcatccctctctaccgcaatggtgacttcttcatctcgtctaaggacttgggttacgactacagctacctccaggactcggacccagactcttttcaagactacatcaagtcatacctggaacaggcatcgcggatctggtcatggctgctcggcgcggcaatggtgggagccgttttgaccgctctccttgccgggctggtgagcctcctctgccgccataaacgcaagcagctgccggaagaaaagcagcccctgctgatggagaaagaggactaccactcactttaccaatcccacctc

SEQ ID NO: 20613 - DNA, 1587 bp, synthetic construct
  misc_feature 1..1587: note = source = /note="Description of Artificial Sequence: Synthetic coding sequence"
  source 1..1587: mol_type = other DNA
atgctccttgcagtgctttactgcctgctctggagcttccaaacctcagcaggtcattttccccgtgcttgtgtgtcatcgaagaacctgatggaaaaagaatgctgtccaccttggagcggcgatcgcagcccatgcggacaactgtcaggacgaggctcgtgccagaacatcctgctgtcgaatgcccctcttggtccacagttcccttttaccggagtcgatgatagggagtcctggccatcggttttctacaatcggacttgccagtgtagcggtaatttcatgggttttaactgtggcaactgtaagttcggattttgggggcctaactgtaccgaacggagacttctggtgagaaggaacatatttgatctgtcggcaccagagaaagataagttcttcgcataccttaccctggcaaagcatactattagctcagactacgtgatacctattggtacctacggacagatgaagaacggatccaccccaatgtttaacgacattaacatctacgatctttttgtgtggatgcattactatgtcagcatggatgctcttcttggtgggagcgaaatttggcgcgacatcgattttgcccatgaagctcccgcttttcttccctggcatcgcctttttctgcttagatgggaacaggagattcaaaagctgactggagacgaaaactttactatcccttactgggattggcgagacgcagaaaaatgtgatatatgtaccgatgagtacatggggggacagcatccaactaatcctaatctccttagcccagccagctttttctcgtcatggcaaatcgtgtgttcgaggctggaagaatacaactcgcatcaatcgctctgtaacgggacgccagaggggccactgagacgaaacccaggtaaccacgacaagagcaggaccccaagattgccctccagcgcagatgttgaattttgcctctcgttgacgcaatacgagtccggatcaatggataaagcggcgaacttttcctttcgcaacaccctcgaaggattcgcttcgcctcttacggggatcgcagatgcatctcagtcctcaatgcataacgcactgcacatttacatgaacgggaccatgtcgcaggtccagggatctgcgaacgatcctattttcctcctgcaccatgcattcgtggatagcatttttgaacaatggttgaggagacacagacctcttcaagaagtgtatcctgaagcaaatgcgcccatcggccataaccgggaaagctacatggtgccgttcatcccactttaccggaatggcgactttttcatcagctcaaaggatcttggatacgattattcctaccttcaagatagcgacccagactcctttcaagactacattaagtcgtatcttgagcaggcaagccgtatttggagctggcttctgggggctgcaatggttggagccgtgttgactgcactgctcgcgggtcttgtgtcgcttctttgtcggcataaaagaaagcagttgccagaggagaagcagcctctcctgatggagaaggaggattaccattccctgtaccaatcccacctg

SEQ ID NO: 20614 - DNA, 1587 bp, synthetic construct
  misc_feature 1..1587: note = source = /note="Description of Artificial Sequence: Synthetic coding sequence"
  source 1..1587: mol_type = other DNA
atgttgcttgcagtgttgtattgccttctgtggtcatttcaaaccagcgctggacattttcctcgcgcttgtgtctctagcaagaaccttatggaaaaagaatgttgtccaccttggagcggcgacaggtcgccctgtggtcaactttccggacggggatcctgccaaaacattctgctttcgaatgcccccctggggccgcaatttccgtttactggagtggatgacagagagagctggccgtccgtgttttacaacaggacttgccagtgttccggtaacttcatgggtttcaattgcggtaattgtaagtttggcttttggggccctaattgtacggaaagacgactccttgtgagaagaaacatctttgatctttccgctccagagaaagataagttcttcgcctacttgacccttgctaagcacaccatttcttcagactacgtcatcccaatagggacctacggtcagatgaaaaacggcagcacgcctatgtttaatgacattaacatttacgacctcttcgtgtggatgcattactacgtctctatggatgcattgcttggagggtcagagatttggagagatattgattttgcacatgaagcacctgcatttctgccatggcacagactgttccttctgcggtgggagcaagaaattcagaagttgaccggtgatgaaaactttaccatcccttactgggactggcgggatgcggaaaagtgcgacatttgcaccgatgaatacatgggtgggcaacatcctaccaacccgaaccttctctcccccgcgtcgttcttcagctcctggcaaattgtgtgcagccgcctggaagaatacaactcccatcagtcgctttgcaacggtacccccgagggaccgctcagacggaacccaggaaaccatgataagagcagaactcctagactgccctcgtccgctgatgtcgagttttgtctttcgcttactcagtacgagtcgggctcgatggacaaggcggccaacttttcattccggaacactttggagggattcgcaagccctctcactggtattgctgatgcatctcagtctagcatgcataacgcccttcatatctatatgaacggtacgatgtcgcaggtgcagggttcagcaaatgatccgatatttctgctgcatcatgccttcgtggattccatctttgaacagtggcttaggcgtcacagaccactccaggaagtgtaccctgaagcaaacgcccctattggccacaacagagagtcgtacatggtccctttcatcccactttaccgcaacggagacttctttatctcatctaaagatcttgggtacgattatagctacctgcaagatagcgacccagattcgttccaagactacattaagtcctacctcgaacaggcatccaggatctggtcgtggctcctcggagcagccatggtcggggcagttctgactgcccttttggcgggcctcgtgtccctgctgtgtcgtcacaagagaaagcaacttccagaagaaaagcaacctcttctgatggagaaggaggattaccactccctttatcaatcgcatttg

SEQ ID NO: 20615 - DNA, 1587 bp, synthetic construct
  misc_feature 1..1587: note = source = /note="Description of Artificial Sequence: Synthetic coding sequence"
  source 1..1587: mol_type = other DNA
atgctgctcgccgtgctgtactgtcttctgtggtctttccagactagtgcgggacactttcctagggcttgcgtttcttcgaaaaatctcatggaaaaagaatgttgtcctccttggtccggagataggtcaccctgtggacagctctctgggaggggaagttgtcagaatatacttctctccaacgcaccactgggaccacagttccctttcacaggagtcgatgacagggagtcttggccctcagttttttataaccggacatgtcagtgcagtggaaacttcatggggttcaattgtggaaactgtaagttcggattctgggggccaaactgcacagaacgaagactcctagtccgcaggaacatcttcgatctgtctgcgcccgaaaaagataagttctttgcatatctcacattagcgaaacacactatctcctctgattacgtgatccctatcggaacttatgggcaaatgaagaacgggtctacacccatgtttaatgatataaacatatatgatctttttgtctggatgcattactatgtctccatggatgctctcctaggaggatctgaaatttggagggatatcgattttgctcacgaagctccagcattcctcccatggcaccgactgttcctcttgaggtgggaacaagaaatacagaaacttacaggagatgaaaatttcacaattccatattgggattggcgggatgccgaaaaatgcgatatttgcacagatgaatatatggggggacagcatcccacaaacccaaatctcctttctcctgcatccttcttctcctcctggcagatagtttgtagtagactagaagaatataactcccaccagagtttatgtaatggaacaccggaggggccactgcggcggaaccccgggaatcacgacaagtctaggacacctcgccttcctagttccgccgatgtggaattttgtctcagtctcacacagtatgaatcaggatcaatggataaagccgctaacttttccttccgcaatacacttgaaggatttgccagtcctctaacaggaattgctgatgcatcacagagttctatgcataatgccttgcacatctatatgaacgggactatgtcacaggtccaagggtctgctaatgatccaatcttcctgctgcaccacgcttttgtggatagtatctttgagcagtggctacggagacatcgtcctctacaggaagtttaccctgaggcgaatgctcccatcggacacaatcgggaatcttacatggtaccttttatcccactctataggaacggggatttttttatctcatccaaagatctggggtacgattattcctacctacaggattctgaccctgattctttccaggattacatcaaatcttatctcgaacaggcttctcgcatctggagttggctactcggggcagctatggtgggggccgtcctgactgccttgctggcaggacttgtgagtctcctgtgcaggcacaaacgaaaacagctacctgaagaaaaacagcccctacttatggagaaagaagattaccattcactctaccaatcacatctt

SEQ ID NO: 20616 - DNA, 1587 bp, synthetic construct
  misc_feature 1..1587: note = source = /note="Description of Artificial Sequence: Synthetic coding sequence"
  source 1..1587: mol_type = other DNA
atgctgctggccgtgctttactgtctgctgtggtcgtttcaaacttcagcaggccattttcctagggcctgtgtgtcctcgaaaaaccttatggagaaggagtgttgtcctccatggtcaggtgaccggtcgccatgcgggcaacttagcggacgaggtagctgtcaaaacatccttctgtcgaacgctccccttggtcctcagttcccattcacgggagtggacgatcgagaatcgtggcctagcgtgttttacaacaggacctgtcagtgcagcggaaacttcatgggtttcaattgcggcaattgcaagttcggtttttggggtccaaattgcactgaacgtaggctgctcgtcagacgtaacatctttgatctgagcgctccggaaaaggacaagtttttcgcatacctgactctggcaaagcacaccatctcatcggactacgttatacctatagggacctacggacagatgaagaacggatccaccccaatgtttaacgatatcaacatctacgatctgttcgtgtggatgcattactacgtgtccatggatgccctcttgggaggctcggaaatttggcgcgacattgactttgctcacgaagcacctgccttcctgccatggcaccggctgtttctcctgcgttgggaacaagagattcaaaagctgactggtgatgaaaactttaccattccatactgggattggagagacgcagaaaaatgcgatatctgcactgacgaatacatgggtggacagcatccaaccaacccaaatcttctctcacccgcctccttcttttcctcctggcaaatcgtctgtagccgactcgaagagtacaattcccaccagtccctctgtaacggcactccggagggccctcttaggagaaaccctggaaaccacgacaagtccagaactccgagactgccttcctcagccgatgtggaattttgcctgtctcttacccagtacgagtccggttcgatggataaggccgcaaatttctcgttccgcaatacccttgaaggttttgcaagccctcttactggtatagcagacgcttcgcagtcctctatgcataacgcccttcatatctacatgaatggaaccatgtcgcaagtgcagggctccgcaaacgatcctatctttcttcttcatcatgccttcgtggactccatctttgaacagtggctgcgacgacacagaccccttcaggaagtctacccagaagcaaacgcacctatcggtcacaacagagagagctacatggtgccctttattcctctttacagaaacggggacttctttatctcctctaaagatcttggatacgattactcgtaccttcaggatagcgatccggattcgtttcaggactacattaagtcgtacctggaacaggcttcccggatatggtcatggctgctgggagccgcgatggtcggggcagtcctgactgcactgctcgcgggtctggtgtccctcctttgtcgtcataaaagaaagcaacttccagaggaaaagcaacccctgctgatggaaaaggaagattatcattcgctttaccagtcccacctg

SEQ ID NO: 20617 - DNA, 1587 bp, synthetic construct
  misc_feature 1..1587: note = source = /note="Description of Artificial Sequence: Synthetic coding sequence"
  source 1..1587: mol_type = other DNA
atgcttctcgccgtgctgtattgcttgctctggtcctttcaaaccagcgccgggcacttccctagagcttgtgtttcaagcaaaaatcttatggaaaaagaatgttgccccccatggtccggtgatcgcagcccctgcggacagctctcaggacgaggcagttgtcagaatatcctgctgtccaatgcacctctgggtcctcagttccctttcaccggcgtcgacgacagggagtcatggccatcagtgttctacaatcgaacttgccaatgttccgggaatttcatgggcttcaactgtggcaactgtaagttcgggttctggggcccaaactgcaccgaaaggagacttctggtgcggcggaatatttttgacctgtctgcgcccgagaaggataagttctttgcctatctcacactcgctaagcatacaatctcatcagattacgtcatccccattggtacttacgggcagatgaagaatgggtctacacctatgttcaatgacatcaatatctatgatctgttcgtgtggatgcactattacgtgagtatggatgcactgctcggaggatctgagatctggagggacatcgacttcgctcatgaagctcccgctttcttgccatggcataggctgttcctgttgagatgggaacaggaaattcagaaactcactggcgacgagaatttcactatcccatattgggattggcgcgatgcagaaaagtgcgacatatgtacggatgaatacatgggggggcagcatcctaccaatcccaatctgctgtctcctgcttccttcttttcaagctggcagatcgtgtgctcaaggctggaggagtataatagtcatcaatccctttgcaatggcactccagaggggcccctgagacggaatccaggcaatcatgataagagccgcaccccaaggctcccaagtagcgcagatgtcgagttttgcctctcactgacccagtacgaaagtgggtcaatggacaaagcagccaatttttcatttaggaatactttggaaggatttgcctcaccattgaccggtatcgctgacgccagccagtccagcatgcataatgctttgcatatttatatgaacggaaccatgagccaagtgcagggctcagccaatgaccccatttttctgctgcaccatgccttcgtcgactctattttcgagcagtggcttcggcgacacaggccactgcaggaggtgtatccagaggccaatgctcctattgggcacaatagagaaagttacatggtgccttttatccccctctataggaacggcgactttttcatttcttctaaagacttgggatatgattattcttatctccaggactctgacccggactccttccaagactacataaaatcctatctggagcaagcaagtcgcatctggtcctggctgctcggggccgccatggtgggagctgtcctgacagcactgcttgcaggcctcgtgtcactgttgtgccgccacaagcggaagcagctgccagaggagaagcaaccattgctgatggagaaagaggattaccactctttgtaccaaagtcatctg

SEQ ID NO: 20618 - DNA, 1587 bp, synthetic construct
  misc_feature 1..1587: note = source = /note="Description of Artificial Sequence: Synthetic coding sequence"
  source 1..1587: mol_type = other DNA
atgttgctggcggtcttgtactgcctcttgtggtccttccaaaccagcgcgggtcatttcccaagagcgtgcgtgagtagcaagaacctgatggagaaggaatgttgcccaccgtggagcggagacagatcgccatgcggccagctgtcgggacgcggttcctgccaaaacattctcctctccaatgccccgctgggaccacaattcccgtttactggggtcgatgaccgtgagtcctggccttccgtgttttacaaccggacctgtcaatgtagcggaaacttcatgggatttaactgtgggaactgcaagttcggattctggggccccaattgcactgaacggagactcttggtgcgacggaacattttcgacctgagcgcgcctgagaaggataagttcttcgcctacctcactctcgcgaagcatactatctcttcagactacgttatccccatcggcacctatggacaaatgaagaatgggtcaactcctatgtttaacgatatcaacatctatgaccttttcgtgtggatgcattactacgtgagcatggatgcgctgctgggaggaagcgagatctggcgcgacattgactttgcgcatgaagcaccggccttcctgccgtggcaccgcctgttcctgctccggtgggagcaggagatccagaagctgacgggggacgagaacttcaccatcccgtactgggattggagagacgccgaaaagtgcgatatctgcactgatgagtatatgggtggacaacatccgaccaacccgaacctcctgtccccggcgagctttttctcatcctggcagattgtctgttcgcgcctggaagagtacaactcccaccaatccctctgtaacggcactccagagggaccgctgaggcggaatcctggaaatcacgataaatccaggaccccaagactgccatcctcggcggatgtggaattctgcctgagcctcacgcaatatgaatcaggatcgatggataaagcggctaacttctcatttcggaacactcttgaaggcttcgccagcccgctgactggaatcgcagatgcgtcgcagtcctcaatgcacaacgctcttcatatctacatgaatgggaccatgtcgcaagttcaaggttcggcaaatgaccctatctttttgctgcaccatgccttcgtggactccatcttcgagcagtggctgcggcggcacaggcccctgcaggaggtgtacccggaggcgaacgctccgattggacataaccgcgagtcatacatggtgccgttcatcccactgtaccgcaacggagatttcttcatcagctcgaaggatctggggtacgattactcgtacttgcaggacagcgacccagattcgttccaggattacatcaagtcgtaccttgagcaggcctctcgcatctggtcctggctgctgggtgctgcaatggtgggcgcagtgttgaccgccctcctcgcaggactcgtgtcacttctgtgtcggcataagagaaagcaactgccggaagagaagcagccgctgctcatggaaaaggaggactaccacagcctgtaccaatctcacctc

SEQ ID NO: 20619 - DNA, 1587 bp, synthetic construct
  misc_feature 1..1587: note = source = /note="Description of Artificial Sequence: Synthetic coding sequence"
  source 1..1587: mol_type = other DNA
atgctattagcggttctatattgtttattatggtcgtttcaaacgtcggcgggtcattttccgcgtgcgtgtgtatcgtcgaaaaatctaatggaaaaagaatgttgtccgccgtggtcgggtgatcgttcgccgtgtggtcaactatcgggtcgaggttcgtgtcaaaatatattattatcgaatgcgccgctaggtccgcaatttccgtttacgggtgttgatgatcgagaatcgtggccgtcggttttttataatcgtacgtgtcaatgttcgggtaattttatgggttttaattgtggtaattgtaaatttggtttttggggtccgaattgtacggaacgtcgtctattagtacgacgtaatatatttgatctatcggcgccggaaaaagataaattttttgcgtatttaacgctagcgaaacatacgatatcgtcggattatgttataccgataggtacgtatggtcaaatgaaaaatggttcgacgccgatgtttaatgatataaatatatatgatttatttgtatggatgcattattatgtatcgatggatgcgctattaggtggttcggaaatatggcgagatatagattttgcgcatgaagcgccggcgtttttaccgtggcatcgattatttttactacgatgggaacaagaaatacaaaaactaacgggtgatgaaaattttacgataccgtattgggattggcgagatgcggaaaaatgtgatatatgtacggatgaatatatgggtggtcaacatccgacgaatccgaatctattatcgccggcgtcgtttttttcgtcgtggcaaatagtatgttcgcgactagaagaatataattcgcatcaatcgctatgtaatggtacgccggaaggtccgctacgacgtaatccgggtaatcatgataaatcgcgtacgccgcgtttaccgtcgtcggcggatgtagaattttgtttatcgttaacgcaatatgaatcgggttcgatggataaagcggcgaatttttcgtttcgaaatacgctagaaggttttgcgtcgccgttaacgggtatagcggatgcgtcgcaatcgtcgatgcataatgcgttacatatatatatgaatggtacgatgtcgcaagtacaaggttcggcgaatgatccgatatttttactacatcatgcgtttgttgattcgatatttgaacaatggctacgtcgacatcgaccgttacaagaagtatatccggaagcgaatgcgccgataggtcataatcgtgaatcgtatatggtaccgtttataccgctatatcgtaatggtgatttttttatatcgtcgaaagatttaggttatgattattcgtatttacaagattcggatccggattcgtttcaagattatataaaatcgtatctagaacaagcgtcgcgtatatggtcgtggctactaggtgcggcgatggttggtgcggtactaacggcgttattagcgggtttagtttcgctattatgtcgacataaacgtaaacaactaccggaagaaaaacaaccgttattaatggaaaaagaagattatcattcgctatatcaatcgcatcta

SEQ ID NO: 20620 - DNA, 1362 bp, synthetic construct
  misc_feature 1..1362: note = source = /note="Description of Artificial Sequence: Synthetic coding sequence"
  source 1..1362: mol_type = other DNA
atggatccctatatgatccaaatgtcatctaaagggaacctcccctctatcctagatgtacacgtgaacgtcgggggacggtcaagcgttcctggcaaaatgaaaggtcggaaggcacgctggtcagtccgaccaagcgacatggccaaaaagacgtttaacccaatcagagccatcgttgacaacatgaaggtgaaaccaaatcccaacaaaacgatgatctcactatccatcggtgacccgaccgttttcgggaacttgcccacggacccagaagtgacccaagccatgaaagatgctctagactctgggaaatataacgggtatgctccgtccattggcttcctgagctcaagagaggaaattgccagttattaccattgtccagaggctcccctggaggccaaggatgtcatcctgacatcgggatgttctcaggcaatcgatctgtgcctagccgtgctggccaacccagggcagaacatcctagttccaaggcccggcttcagtctttacaagaccctggcggaaagcatgggtattgaggttaagctgtacaacctgctgcccgagaaaagctgggaaatcgacctgaagcagctggaatatctgattgacgaaaaaacagcttgcctcattgtcaacaatccttccaatccttgcggcagtgttttcagcaaacgccatctgcaaaagatcctggccgtagccgctaggcagtgcgtgcctattctcgctgatgagatttacggagatatggtgttctcggactgcaaatacgagccactggccacactgagcacagatgtcccaattctatcctgcggcgggctggccaaaaggtggctagtccccggttggcggttggggtggatattgatacatgataggcgcgatatttttggcaatgagatcagagacggattagtcaaactatcccaaagaatcctcggcccgtgtacaattgtgcagggggccctgaagtccatcttgtgcaggactcccggcgaattctatcacaacacacttagctttctgaaatcaaacgcagatttatgttatggcgccttggcagcgattcctgggctgcgtccagtgaggccatctggtgcaatgtacctcatggttggaatagagatggagcattttccagagtttgagaatgacgtagaattcactgagagactcgtcgctgagcagagtgtacactgcttgccagccacgtgttttgaatatccaaatttcattcgcgtggttataacagtgcccgaggtgatgatgttggaagcttgttcccgtattcaggaattttgtgaacagcactaccattgtgcagaggggagccaagaggagtgcgacaag

SEQ ID NO: 20621 - DNA, 1362 bp, synthetic construct
  misc_feature 1..1362: note = source = /note="Description of Artificial Sequence: Synthetic coding sequence"
  source 1..1362: mol_type = other DNA
atggatccatacatgattcaaatgagcagtaaaggcaatctgcccagcattcttgacgtgcatgtcaatgtggggggccgctcctccgtgccaggcaagatgaaaggccggaaggcccggtggtctgtgagaccctctgatatggcgaagaaaacgtttaaccctatacgggccatcgtggataatatgaaagtgaagccaaacccaaataagacaatgattagcttaagcattggcgatcctactgtctttggtaacctccccaccgaccccgaggttacccaggccatgaaggatgcattggactccggtaagtataacggatacgctcctagcatcggcttcctgtcgtctagggaggagatcgcctcttactatcactgtcctgaagcacccctggaagctaaggacgtcatcttaacctctggttgtagtcaagcgattgatctgtgtttagcagtgctggccaacccagggcagaatattcttgtccctagaccaggattttcactctacaagactctggctgaaagtatgggaattgaggtaaagctgtacaacctgttgcctgaaaaaagttgggagattgacttgaagcaactggagtacctcatcgacgaaaagacggcatgcttaatagtcaacaatcccagtaacccttgcggctccgtgttctccaagagacacctgcagaaaatccttgcggtggctgcgagacagtgcgttcccattctggccgacgaaatttacggcgacatggtgttcagcgattgtaagtatgagcccctggccacactgagcacggacgtgcccatattgtcttgtggcggccttgcgaaacggtggctggttccgggttggaggctagggtggatcctgatccacgataggcgagatattttcgggaacgagattagagatggtctggtaaagttgagccagcggatcctcggaccttgcacgattgtgcagggcgctctgaaatcaatcctgtgtcgaacacctggggagttttatcacaacacactgtctttcctgaaatccaacgccgacttgtgctatggtgccctggccgctatccctgggctgcggcccgtgcgaccaagtggagctatgtacctgatggtggggatcgaaatggaacacttcccggagttcgagaatgatgtcgagtttacagagagactggtggcagaacagagcgttcactgcctgccagccacctgtttcgagtaccctaactttattagggtggtgataactgtaccggaggtaatgatgcttgaagcctgttccagaatccaggaattctgcgaacaacactatcactgcgccgagggttcccaggaagaatgcgataaa

SEQ ID NO: 20622 - DNA, 1362 bp, synthetic construct
  misc_feature 1..1362: note = source = /note="Description of Artificial Sequence: Synthetic coding sequence"
  source 1..1362: mol_type = other DNA
atggacccttacatgatccaaatgtcctctaaaggaaaccttcctagtatcctggacgtccatgtaaacgtgggtggacgatcctcagtgccgggcaagatgaagggtcggaaagcgcgttggagcgtgcgcccttcggatatggcaaagaaaacttttaatcctattcgagctatcgtggacaatatgaaggtgaaacctaatcctaataaaactatgatttctcttagcatcggggatccgactgtcttcggaaatttaccaacagatccggaggtgactcaagccatgaaggatgccttagacagcgggaaatacaacggctacgccccctccatcgggtttttatcgtcacgcgaggaaattgcctcatactatcactgtccagaagctccgttagaagccaaagatgtaatccttacatccgggtgttcccaggctatcgacctgtgcctggccgtccttgccaacccaggccagaatatattggtgccgcgtcccgggttttccctgtataagaccctagctgagagcatgggcatcgaggtgaaactctacaacttgctccctgaaaaatcttgggaaatcgatctgaagcagcttgaatacctgattgacgagaagactgcatgccttatcgtgaataacccgtcaaatccctgcggaagtgtcttctccaaaagacatctacaaaaaattctggccgtggccgctcgacagtgcgtcccaattctcgctgatgagatatacggcgatatggttttcagcgattgcaaatacgagccattggctaccctgtccacagacgtcccaatcctttcatgtggcggactcgccaaacgctggctggttcccggctggcggcttggttggattctgatacacgaccgccgggacatatttggaaatgaaatcagagatggccttgtgaagttgtcccagaggatattgggtccatgtactattgtccaaggtgctttgaagagcattttgtgccggacgcccggagagttttatcacaatactctgtcattccttaaaagtaatgccgatctatgttacggagccctggccgccatccctgggctgagacctgtcaggcctagcggggccatgtatctgatggttggcatagagatggaacatttcccagagttcgaaaatgacgtcgagttcactgagcgactggtagccgaacaatccgtccactgtctgcccgcaacctgctttgagtatcccaattttatcagggttgtgatcaccgtccctgaagtgatgatgctcgaagcctgcagccggatacaggaattctgtgaacagcactaccattgcgccgaaggttcccaagaagaatgtgacaag

SEQ ID NO: 20623 - DNA, 1362 bp, synthetic construct
  misc_feature 1..1362: note = source = /note="Description of Artificial Sequence: Synthetic coding sequence"
  source 1..1362: mol_type = other DNA
atggacccgtacatgatccagatgagctccaagggcaatctgccatcgatcctcgacgtgcatgtcaacgtgggaggacggtccagcgtcccaggcaagatgaagggccggaaggcacgctggagcgtgaggccttcggatatggcaaaaaagacgttcaatcctatccgcgccatcgtggacaacatgaaggtgaaacctaacccgaacaaaaccatgatttccctgtccattggcgaccccaccgtctttggaaacctgccaactgatccagaagtgacccaggctatgaaggacgccctggattcgggaaagtataacggatacgccccgagcatcggattcctgtcatcgcgggaagagatcgcatcgtactaccactgcccagaagcgccgttggaagcaaaggacgtaatactcacctcaggatgctcccaggccatcgacctgtgcctggcggtgctcgcaaaccccggacaaaacatccttgtgccgcgccctggtttctccctgtacaaaaccctcgccgaaagcatgggaatcgaggtgaagctctacaatctgctgccagaaaagtcatgggaaatcgacctcaagcagctggaatacctgatcgacgaaaagacggcgtgccttatcgtgaataatccaagcaacccatgcggctccgtgttttcaaaacgccatctgcagaagatcttggccgtggcagccagacaatgcgtccctatcctcgcagatgagatctacggcgacatggtcttttcggactgcaagtacgagccactggcaactctgtccaccgacgtgccaatcttgtcgtgtggcggcctcgctaaacggtggctggtgccgggatggcgactcgggtggatccttatccacgatcgcagagacatcttcggcaacgagatccgggatggactcgtgaagctgtcgcagcggatcctgggaccttgtactatcgtgcagggagccctcaagtcaatcctttgcaggactccaggagaattctatcataacaccctcagcttcctcaagagcaacgccgacctgtgttacggagccctcgctgccatccctggattgcggccagtccgcccatcaggggcgatgtacctgatggtaggcattgaaatggaacactttccagagtttgagaatgacgtggaattcacggaacggctggttgccgagcaatcagtccattgcctgccggctacctgtttcgagtacccgaacttcatccgcgtggtcatcaccgtgccagaagtgatgatgctggaggcttgctcgagaatccaggagttctgtgagcaacactaccactgcgctgaaggatctcaggaggagtgtgacaag

SEQ ID NO: 20624 - DNA, 1362 bp, synthetic construct
  misc_feature 1..1362: note = source = /note="Description of Artificial Sequence: Synthetic coding sequence"
  source 1..1362: mol_type = other DNA
atggatccatatatgatccaaatgtcatcgaagggaaatctgccatcaatcctggacgtccatgttaacgtgggcggccggtcgagcgtgccaggaaagatgaaaggacgcaaggctcgctggagcgtgcgcccttcggacatggccaaaaagacctttaacccgatccgcgccatcgtggacaatatgaaggtgaagccgaatccgaacaagactatgatctccttgagcatcggtgacccgaccgttttcgggaacctcccgacggacccggaagtaacccaagccatgaaggacgcgctggattctggaaaatacaatggatacgccccgtcgatcggattcctgtcgtcgcgggaagaaatcgcgagctactaccactgccccgaagctccgctcgaggccaaggacgtgatcctcaccagcggctgttcccaggcaatcgacctctgcctggcagtgttggccaatcccggacagaacatcctggtcccacgccccggtttcagcctgtacaagactttggccgagtcaatgggaatcgaggtgaaactgtacaaccttttgccagagaaatcctgggaaatcgatctgaagcagcttgaatacctcattgacgaaaagactgcttgtctgatcgtcaataatccgtcaaacccgtgcggcagcgtgttctccaaacgccatttgcagaagatcctggcggtggcagcaagacagtgtgtgccaattctggcagacgagatttatggcgacatggtgttctcggattgcaaatacgagccgctggccaccctgtccaccgacgtgccgatcctctcctgcggtggcctggccaaacgctggctggtcccaggctggagactcgggtggattctcatccacgaccggcgcgacatcttcggaaacgaaatccgggacggcttggtgaaactttcccaacggatcctcggaccgtgtaccatcgtgcaaggggcgttgaaaagcatcctgtgtcggactcctggtgaattctaccataacactctgtcattcctcaaatcaaacgcagacctgtgctacggagccctcgcagccatcccgggacttagacctgtgcggccttccggagccatgtacctgatggtgggaatcgagatggagcacttcccagagttcgaaaacgatgttgaattcaccgagcgactggttgcggagcagtccgtccattgtctcccggctacctgcttcgagtatccgaacttcatcagggtggtaatcaccgtgcccgaagtgatgatgcttgaggcatgctcgcggatccaggagttctgcgaacagcactaccactgcgctgaaggcagccaggaggaatgcgacaaa

SEQ ID NO: 20625 - DNA, 1362 bp, synthetic construct
  misc_feature 1..1362: note = source = /note="Description of Artificial Sequence: Synthetic coding sequence"
  source 1..1362: mol_type = other DNA
atggacccctatatgatacagatgagttcaaaggggaatctcccatcaatcctggacgtgcacgtgaatgtcggcgggagatctagcgtgccgggcaaaatgaaaggaagaaaagcccgctggtccgtgcgacctagcgatatggctaaaaagacgttcaatccaataagggctattgtcgataatatgaaggttaaacccaatcccaataagactatgatatcgttgtctatcggtgatccgaccgtctttggcaacttaccaactgatccagaggtgacccaggctatgaaagatgcacttgacagtgggaagtacaatggatatgcacccagtatcggctttctttcatccagagaagagatcgccagctactaccactgccccgaagcgcctctggaggcaaaggacgtcattctgacgtcgggatgttctcaggctatcgatctttgcctggcggtgctggccaaccctggtcagaatattctagttccccgtccagggttctccctgtataagaccctcgcagaatccatgggcattgaagttaagttatacaatcttctacccgaaaagtcttgggaaattgacctgaagcaattggaatacctcatcgatgaaaagacagcctgcctaatcgtgaacaaccccagcaacccctgtggctccgtcttttccaagcgccacctccagaagattctcgccgtcgcggcgcgtcagtgtgtgccaatattagctgacgagatttacggcgacatggtttttagcgactgtaagtacgagccactcgccacactcagcacggacgtgccaatcctgagttgtgggggacttgcaaaacggtggttggttcccgggtggcgtttaggatggatcttgattcacgatcgtcgcgacatcttcgggaatgagatcagggacgggctggtgaaactttcccagcgcattctcgggccctgcaccattgtccagggcgctctgaagagcattctgtgtcggaccccaggtgagttctatcataatacccttagctttctcaagagcaacgccgatctgtgctacggagctttggccgctatacccggtcttagaccagttagaccatccggggccatgtatcttatggtcggaattgaaatggagcatttcccggaatttgagaatgatgtggagtttaccgaaaggctggtggccgaacagtctgtgcactgcttgcccgcaacatgcttcgagtacccaaattttatccgtgtggtcatcacggtccctgaggtcatgatgctggaggcatgctcacggatccaagagttctgcgagcaacactaccactgtgccgagggaagccaggaggaatgtgacaag

SEQ ID NO: 20626 - DNA, 1362 bp, synthetic construct
  misc_feature 1..1362: note = source = /note="Description of Artificial Sequence: Synthetic coding sequence"
  source 1..1362: mol_type = other DNA
atggacccatacatgatacagatgtcgtcaaaggggaacctgccctccattctggacgttcacgtgaacgtcgggggaagatcctcggtccccggtaaaatgaaagggaggaaagcccgatggtcagtccggccgagtgatatggcgaaaaaaaccttcaatccaatccgtgcaatcgttgataatatgaaagtcaagcctaaccccaacaagaccatgatttcactgtctatcggggaccctacagtgttcggaaatcttcccacagaccccgaggtgacccaggccatgaaggacgcccttgacagtgggaaatacaacgggtatgcgccttctattggctttctatctagccgggaagagatagcttcctattaccactgccccgaggcccccctggaagcaaaggacgtgatactgacaagcggttgctcacaggccattgacctgtgtctggctgtgctggcaaaccctgggcagaatatcctggtaccgcggcctggattctccttgtataaaactcttgcagaatccatggggatcgaggtaaagttatacaacctgctccccgagaagtcctgggagattgacctcaaacaactggaatacctcatcgatgagaagacagcctgccttatcgtgaataacccctctaacccttgcggaagcgtattctcaaagcggcacttacagaaaatcctcgcagtagctgctagacagtgtgtacccattctggccgacgaaatctacggagacatggtattctcagactgcaaatacgaacccttagccaccttgtccaccgatgttcctatattaagctgtggggggttggccaagcgctggctagtgcctggttggcggctcggctggatacttatccacgacagacgcgacatctttggaaatgaaattcgagacggcctagttaagctcagccagcgaattctcggaccctgcaccatcgtgcagggagccttaaaaagtatcctctgtcgaacccctggggagttttaccacaataccttgtctttccttaaaagtaatgctgatttatgctacggggcactcgccgcaattcccgggctccgccctgtcaggccatccggagctatgtatctcatggtaggcatcgagatggaacacttcccagagttcgagaacgatgttgagtttacagaacgtctagttgccgagcagagcgtgcactgcctccccgctacctgcttcgaatatcctaacttcatacgagtggtgataaccgtacccgaggtaatgatgttggaagcttgctcccggattcaggagttctgcgaacagcattatcattgcgccgagggttcccaagaggaatgtgataag

SEQ ID NO: 20627 - DNA, 1362 bp, synthetic construct
  misc_feature 1..1362: note = source = /note="Description of Artificial Sequence: Synthetic coding sequence"
  source 1..1362: mol_type = other DNA
atggatccctacatgattcagatgtcctctaagggaaatctgccttcaatactcgatgtgcatgtcaacgtgggggggagatcatcagtgcctgggaaaatgaaaggacgcaaggcacgctggtcagttagaccctctgatatggccaagaaaacttttaaccctataagagcaatcgtcgataacatgaaagttaaaccaaacccaaacaaaacgatgatctctctgagtattggggatcccactgtgttcgggaacctacctacagatccagaagtaacgcaggcaatgaaggatgcactggattctgggaagtacaatggatatgcccctagtattgggtttctctcctcaagagaagaaatcgcgagttattatcactgtcccgaggcaccactggaagcaaaagatgtcattcttacatctgggtgttctcaggctatcgatctctgccttgccgtactagccaaccctggacagaacatcctcgtgccaaggcccggattcagtctttacaaaactttagcagaatctatggggatcgaagttaaattatataacctcctccctgagaagagttgggaaattgatctcaaacaactagaatatttaatagatgaaaagacagcttgtctgattgtaaataacccttctaatccctgcggatcagtgttctccaaaaggcatctacagaaaatactagcagtcgctgcacggcagtgcgtgcccattctggcagatgagatatacggagatatggtcttttctgattgtaagtacgaacccctcgccactctgtctactgatgtgcccatactctcttgtgggggactggctaaacgatggcttgtgcctggatggagacttgggtggatcctcatccatgatcggcgagacatatttgggaacgaaatcagagatggacttgtgaaattatcccagagaatacttggaccgtgtactatagtgcagggggctctaaagtccatcctctgtaggacgccaggggagttttaccacaatacactcagttttttaaaaagtaatgcagatctgtgttatggggcacttgccgctatacctgggctccggccagtgagaccctcaggggctatgtatctaatggtgggaatagaaatggaacacttcccggaattcgaaaacgatgtcgaatttacagaacggcttgtggccgagcagtcagtacattgcctcccagcaacatgctttgaatatcctaattttatacgggtggttataactgttcccgaggtcatgatgttggaagcctgctctaggattcaggaattttgcgaacagcactaccactgtgctgaaggatcccaggaagaatgcgacaaa

SEQ ID NO: 20628 - DNA, 1362 bp, synthetic construct
  misc_feature 1..1362: note = source = /note="Description of Artificial Sequence: Synthetic coding sequence"
  source 1..1362: mol_type = other DNA
atggacccttatatgattcagatgtcgtccaaaggtaatcttccctccatactcgatgtccacgtcaacgttggcggccgctcttcggtgccaggtaagatgaaaggaagaaaggcacggtggtccgtgcggccttcagatatggcaaagaaaactttcaacccaattagagcgattgtggacaacatgaaggtgaagcctaaccctaataagactatgatttcgctctccattggggatccgaccgtgtttggtaaccttccaacggatccagaagtcacccaggctatgaaggatgccttggactcggggaaatacaatggttacgcgccgagcatcggcttcctcagctcgcgggaagagattgccagctactaccattgcccagaggcccctcttgaggccaaggatgtgattcttacttccggctgctcccaagctatcgacctgtgcctggcagtcctcgcaaaccctggtcagaatatccttgtcccgcgtccaggcttttccctgtataagaccctcgcagaaagcatggggattgaagtgaaactttacaatctcctccccgagaagtcttgggaaattgatttgaaacaactggagtacctgatagacgaaaagaccgcttgtttgatcgtcaacaacccatccaatccttgtggtagcgtgtttagcaaacggcacctccagaagatcctggcagtggcggcacgacaatgtgtgccgattttggcggacgagatctacggagacatggtgtttagcgattgcaagtacgaaccactggccaccctgtcgactgatgtccctatactgtcgtgtgggggccttgcgaagagatggctcgttccaggatggaggctcggatggatccttattcatgatcgtcgcgacatatttgggaacgagatccgggatggccttgtgaaactttcgcagaggatcttgggcccttgtactatcgtgcagggtgccctcaagtctattctgtgcagaacgcccggagaattctatcataacaccttgtcattcctgaagtctaacgccgatctttgctacggtgcactggcagccatcccaggactgaggccagtgcgacctagcggagcaatgtacctgatggtgggtattgaaatggaacattttccggagtttgagaacgatgttgaattcactgaaagactggtcgcggagcagtcagtgcattgtttgcccgccacttgtttcgaataccccaatttcatccgtgtggtgattaccgtccccgaagtcatgatgcttgaggcttgttcaagaatacaggaattctgcgaacaacattaccattgtgcagaggggtcgcaagaagaatgtgacaag

SEQ ID NO: 20629 - DNA, 1362 bp, synthetic construct
  misc_feature 1..1362: note = source = /note="Description of Artificial Sequence: Synthetic coding sequence"
  source 1..1362: mol_type = other DNA
atggatccctacatgatccagatgagttcgaaggggaacctgccatctatcctagacgtccatgtcaacgtgggtgggagatccagtgtgccgggcaaaatgaaagggcgcaaggcgcgctggagcgtccgcccgtccgatatggctaagaaaaccttcaacccgattagagcgatcgtggataacatgaaggtgaagcccaatccgaacaaaaccatgatcagtctaagcattggcgaccccactgtcttcggcaacctgcccactgatcccgaggtcacccaggctatgaaagacgccttggattccggcaaatacaatggatacgccccttctattggcttccttagctcacgcgaggaaattgcttcttactatcattgccccgaggcgcccttggaggcgaaggatgtcattctgacctccggctgttcgcaggcgatcgacctttgtctggccgttctcgccaatcccggccagaacatcctcgttcccagacccgggttctcattgtacaagactctcgcggaatctatgggtatcgaggtcaagctgtacaacctgctcccggaaaagtcttgggagatcgatctgaagcagctggagtacctaattgacgaaaagactgcctgtttgatcgtcaataatccctctaacccctgcggctccgtctttagtaagcgacacctgcaaaagattctggcagtcgcggctcggcagtgcgtgcccatactggcggatgagatatacggtgacatggttttctccgattgcaaatacgaacccctggccacactgtccaccgatgtgcccattctgtcgtgcggaggcttggctaagcgctggcttgtccctggctggcgcctaggatggatcctgatccacgatagacgcgacatcttcggaaacgagatccgtgacggtctggttaagttgtcgcaaagaatcctcggaccctgtacaattgttcagggtgctctgaagtcgattctctgccgcacgccgggtgagttctatcataacaccttgagcttcttgaagtcgaacgccgatctgtgttatggcgctctcgctgccattcccggtctccgccctgtacgtcctagcggcgctatgtaccttatggttggtatcgaaatggaacacttccccgagttcgagaacgacgtcgagtttactgagcggttggttgctgagcagagtgtgcattgcctacctgccacgtgtttcgagtaccccaactttattcgcgtcgtgattacggtacccgaggtcatgatgctagaagcatgcagccgcatccaggagttctgcgagcagcactatcactgcgccgagggctcgcaggaggagtgcgacaag

SEQ ID NO: 20630 - DNA, 1362 bp, synthetic construct
  misc_feature 1..1362: note = source = /note="Description of Artificial Sequence: Synthetic coding sequence"
  source 1..1362: mol_type = other DNA
atggacccctatatgatccaaatgagcagcaagggtaaccttccttctatccttgatgtgcatgttaacgtgggtggcagatcctctgtgccagggaaaatgaagggaagaaaagctaggtggtcagtaaggccatctgacatggctaagaaaacctttaatccaatccgcgcaatcgtggacaacatgaaggtgaagcccaacccaaacaagacaatgatctcgctctcaatcggcgatcctaccgtctttggtaacctgcctaccgacccagaagttacccaagccatgaaggatgctctcgattccggaaaatacaatggctatgctcccagcatcgggtttcttagctcacgggaagaaatagcctcttactaccactgccctgaggcgcctcttgaagccaaagatgtgattttaacatctgggtgtagtcaggccatcgacctctgcctcgcagtgcttgccaacccgggacaaaacatcctggtgcctcgcccaggctttagcctatacaaaacactcgctgagagtatgggaatcgaggtgaaactgtacaatctgctgcctgaaaagtcttgggagattgacctaaagcaactcgagtatctgatcgacgagaaaacagcttgcctgatcgtgaacaacccgtcaaacccgtgtggatccgtgtttagcaagagacatctgcagaagatactggcagtagccgcgcgccagtgcgttccaatcctggccgacgagatctacggagatatggtgttctccgattgcaagtatgagcctctggcaactctatcaactgatgtccccatccttagttgcgggggactggcaaaacgatggcttgttccaggatggagactgggatggatcctgatccatgacagaagagatatcttcggcaatgaaataagggacggcctggtcaagctttcccagcggatccttggtccttgcaccatcgttcaaggggctctcaagtccatcctgtgccgcaccccaggagaattctaccataacacactgtccttcctgaaatcaaatgctgacttgtgctacggagctctggccgccatccctggcctgcgccctgtaagaccctctggagctatgtatttaatggttggcatcgaaatggaacacttccctgaatttgagaatgacgtggagttcactgaaagactggttgcagagcagtctgtccactgcctccccgctacttgttttgaatacccgaactttatccgcgtggtcatcactgtgcctgaagttatgatgctggaagcatgtagccgcatccaggaattttgtgagcagcactaccactgcgcagaggggagccaggaagagtgtgacaag

SEQ ID NO: 20631 - DNA, 1362 bp, synthetic construct
  misc_feature 1..1362: note = source = /note="Description of Artificial Sequence: Synthetic coding sequence"
  source 1..1362: mol_type = other DNA
atggacccctacatgatccagatgtcatccaaagggaatcttccctccattctggatgttcacgtgaatgtggggggacggagttccgtccctggcaagatgaagggaagaaaggcacgctggtcagtgcgcccctccgacatggccaagaaaactttcaatcccatcagggctatcgtagacaatatgaaagtaaaaccaaatccaaataaaaccatgatttctctatccatcggagatccaacggtgtttgggaacctgcccacagatccggaggtgacccaggccatgaaggacgctctggatagcggtaaatataatggctatgctcccagcatcggcttcctgtccagccgggaggaaattgcctcttactaccactgtccggaggccccactagaggctaaagacgtgatcctcaccagcggttgcagccaggcaatcgatctgtgtctggccgtcctcgccaaccctggtcagaatatcctagtgccccgacctggattctccctttacaagacattggccgaatcaatggggatcgaggtgaagctatacaacttgttacctgagaagagctgggagattgatctgaagcaactggagtatcttattgacgagaagacagcgtgtctgatcgtcaacaatccctcaaatccctgcggatctgttttttcaaagcgccatctgcaaaagatcctggctgtggccgcaaggcagtgcgtgcctatcctagccgacgagatctacggtgacatggtcttttcagattgcaaatatgagccactggctacgctgtccactgatgtgcccattcttagctgtgggggcctggctaagcggtggcttgtccccggttggaggctggggtggatactaatccacgatcggcgggacattttcggtaacgaaatccgggacgggctggttaagttaagccaacggatattgggcccttgcacgatcgtgcagggagccctcaaatctatactgtgtcgaactccaggggagttctaccacaacaccctgagttttctcaaaagcaacgcggatctatgttacggtgcactggcagcaattcccgggctcaggcccgttaggccctctggggcgatgtatctgatggtgggtatcgagatggaacactttcctgaattcgagaatgacgttgaatttaccgagcggctcgtggctgaacagtccgtacattgtctccccgctacttgtttcgagtacccaaactttataagggtggtgatcactgtccccgaggtgatgatgctggaagcgtgctcccggatacaggagttctgcgagcaacactaccattgcgcggaagggtctcaagaggaatgtgacaag

SEQ ID NO: 20632 - DNA, 1362 bp, synthetic construct
  misc_feature 1..1362: note = source = /note="Description of Artificial Sequence: Synthetic coding sequence"
  source 1..1362: mol_type = other DNA
atggacccatacatgatacagatgagctctaaaggcaatctgccctcaatccttgacgtgcatgttaatgtcgggggcaggagttctgttccagggaagatgaaaggtcggaaagcccgctggagtgttcggcctagtgacatggcgaaaaagacctttaatcctattagggctattgtcgataacatgaaagtgaaacccaaccctaacaagactatgatctccctgtctatcggagaccctaccgtattcggcaacctccccaccgatcccgaggtgacacaggccatgaaggatgccttagattcgggaaagtacaatggttatgccccctctattggattcctgtcgtcaagggaggagatagcctcctattaccattgtcccgaggccccattggaggccaaggacgtgatcttaactagtggttgctctcaggctatcgatctctgcctcgcagtgcttgctaatcctgggcaaaatatcctggtgcctagaccaggcttcagcctctacaagacccttgccgaaagtatgggaattgaagttaagctgtacaatcttctgccagaaaagtcctgggagatagacctgaaacagcttgagtacctgatcgacgaaaagactgcctgtttaattgtcaacaacccctccaacccctgcggctcagtgttttccaagcgccatcttcagaaaatcttggcggtcgctgcccgccagtgtgtcccaattctagctgacgaaatttatggagacatggttttctccgactgcaaatacgagccactggcgaccctttcaaccgatgtgcctatcctgagctgcggcgggctcgctaagcgctggctggtcccaggatggcgactgggatggatactgattcacgatcgacgtgacatttttggtaatgaaataagggacggcctggtcaagctctctcagcggatcctggggccctgtacgattgtgcagggagccctcaagtctatcctgtgtcggactcctggggagttttatcacaatacactgtccttcttaaagagcaatgcagacctatgttacggcgcactcgcggctatacccggtctccgccctgtgaggccgtccggcgcgatgtatctgatggtcggaatagaaatggagcactttccagagtttgaaaacgatgtggaatttacggagaggctcgtcgctgagcaaagcgttcactgcctcccggcaacctgctttgagtacccaaactttattcgtgtggtgatcaccgtgcccgaggtgatgatgctggaggcctgttcgcgaatccaagagttttgcgagcagcattaccattgcgcagagggatcccaagaggagtgcgataaa

SEQ ID NO: 20633 - DNA, 1362 bp, synthetic construct
  misc_feature 1..1362: note = source = /note="Description of Artificial Sequence: Synthetic coding sequence"
  source 1..1362: mol_type = other DNA
atggacccatacatgatccagatgtcctcgaagggtaacctgccgagcatccttgatgtgcatgtcaacgtggggggacggagctctgtgcccggaaaaatgaagggccgtaaggcgagatggtctgtgcgaccatcggacatggcgaagaaaactttcaacccgatcagggccattgtggacaatatgaaggtcaagcctaacccgaacaaaaccatgatctcactgtcgattggcgatcctactgtgttcggaaacttgcctactgacccagaagtgacccaagcaatgaaggatgcacttgattcaggcaaatacaatggctacgccccctccattggcttcctgtcaagccgggaagaaatcgcatcctactaccactgcccggaggcgcctctcgaagcaaaggatgttattctgactagtggatgcagccaagcgatcgatctctgcttggccgtccttgccaacccgggacagaatatcctcgtgccacggccaggattctcactctataagaccctcgcggagtcgatgggaatcgaagtcaagttgtataacctgctgccggagaagtcatgggaaatcgatctcaagcagctcgagtacctcatagacgagaaaactgcttgtttgatcgtgaacaacccaagcaacccatgcggatcagtgttctccaaacggcatctgcaaaagatcttggcagtggctgctcggcagtgcgtgccgatcctggcagatgagatttatggggatatggtgttctcggactgcaagtacgaaccactggcgaccctctcaacggatgtgcccatccttagctgcgggggcctcgcaaagagatggcttgtgccgggatggcgcttgggctggattctgatccatgaccgccgcgacatcttcggcaatgaaatcagggacggcctggtgaagctctcccaacgcatcctcggaccctgcaccatcgtccaaggagctttgaagtcgattctttgccgcactccgggggagttttaccataataccctgtccttcttgaagtcaaatgcagacctctgctacggagctttggccgcgatccccggactcaggcctgtgcgcccgtcgggggccatgtacctgatggtgggaatcgaaatggaacattttccggaattcgagaatgacgtggaattcactgaacgcctggtggcggaacaatcggtgcactgtctccccgctacctgcttcgaatacccaaactttatcagggttgttattaccgtgccggaagtcatgatgctggaagcgtgctcccgcattcaagaattttgcgagcagcactaccattgcgcggagggatcgcaggaagagtgcgataag

SEQ ID NO: 20634 - DNA, 1362 bp, synthetic construct
  misc_feature 1..1362: note = source = /note="Description of Artificial Sequence: Synthetic coding sequence"
  source 1..1362: mol_type = other DNA
atggatccgtacatgattcaaatgtcatcaaaaggaaaccttccttcgattcttgacgtgcatgtcaacgtcggcggccgctcctcggtcccgggtaagatgaaaggtagaaaggcccgctggtccgtgcggccgtcagacatggcgaagaagacctttaatcctattcgcgccatcgtggacaacatgaaggtgaaaccaaacccaaataagactatgatctccctgagtatcggcgaccctaccgtgttcggtaacctgcccacggacccagaagtgacgcaagctatgaaggacgccctcgattcaggcaagtacaacggatacgcgccgtcgatcggattcctgagcagccgcgaagaaatcgcctcctattaccattgtccggaggccccactggaagctaaggacgtgattctcactagcggatgctcacaagcgatcgatctgtgcctcgccgtcctcgcgaatccaggacaaaacatcctggtgccgcggccaggcttctcactctacaaaactctggcagagagcatgggaatcgaggtgaagttgtacaacctgctcccagaaaaatcttgggaaatcgacctgaagcaactggagtacctgatcgacgagaagactgcatgtctcatcgtgaataaccctagcaacccgtgcggatctgtcttctccaaacgccacctccagaagatcctggctgtagcagcgaggcaatgtgtgccgatcttggccgatgagatatacggggacatggtcttctccgactgcaagtacgaaccactcgctactctgtcaactgacgtcccgatcctgtcgtgtggagggctcgctaaaagatggctggtccctggatggcggctgggctggatcctgatccacgaccgccgggacatctttggcaacgaaatcagggatggactcgtgaagttgtctcagaggatcctgggcccttgtaccatcgtgcagggggcactgaagagcatcctgtgcaggactcctggagagttctaccacaacactctgagctttctcaagtccaacgccgacttgtgttacggagcactcgcggccatccctggactccggccggtgcggccctcgggggccatgtacctgatggtgggcatcgagatggaacacttcccagaattcgaaaacgacgtggagttcactgaaaggctggtggctgaacaatcagtgcactgtctgccggccacttgcttcgaataccctaatttcattcgggttgttatcactgtgccggaagtgatgatgttggaagcctgctcgcgcattcaggagttttgcgaacagcattatcattgcgccgaggggtcccaggaggaatgtgacaaa

SEQ ID NO: 20635 - DNA, 1362 bp, synthetic construct
  misc_feature 1..1362: note = source = /note="Description of Artificial Sequence: Synthetic coding sequence"
  source 1..1362: mol_type = other DNA
atggatccttacatgatacagatgtcctcgaagggtaacctgccttcaattcttgacgtgcatgtgaacgtgggcggtaggagctcggtgccaggaaagatgaaaggaagaaaggcaaggtggtcggtgcgaccatctgacatggcgaagaaaacttttaacccaattcgcgcaatcgtggataacatgaaggtcaaacctaaccctaataagacgatgatatctctgagcattggagatccaaccgtctttggcaaccttcctactgaccctgaggtgacccaagcaatgaaggacgcactggattcgggtaagtacaacggttacgcaccatcgataggttttctttcctcacgggaagaaattgcatcatactaccattgtccggaagcaccacttgaagcaaaggacgtcatccttactagcggttgtagccaagctattgatctgtgtctggcagtgcttgcaaatcctggtcagaacattctggtgccaaggccgggtttctcgctctacaagacccttgcagaatccatgggaattgaggtgaagttgtacaatcttcttccggagaagtcctgggaaattgacttgaagcaacttgaataccttattgatgaaaagactgcctgtctcatcgtgaacaacccttccaatccatgtggttccgtcttttcgaagcggcacctgcaaaagatcctggccgtggcagcacgccaatgtgtaccaatcttggcagatgagatatatggggatatggtgttctccgattgtaagtacgagccacttgccaccctgagcaccgacgtccccatcctgagctgcggaggccttgccaagcgatggctggtgcctggatggcgactgggatggattctcattcatgatcgcagggatatctttgggaatgaaattcgagatggcctcgtgaagctctcacagaggattcttggaccttgcactatcgtgcagggggcattgaaatcgatcctgtgtcgaacccctggggagttctaccacaacacgctgagctttctgaaatcgaacgcagatctgtgttacggagcccttgctgctattccaggacttagacctgtccggcccagcggtgccatgtacttgatggtcggtattgaaatggaacatttcccagagtttgaaaacgatgtcgaattcaccgagagacttgtggcagaacaatcagttcactgtctgcctgcaacctgtttcgaatatcctaactttatcagagtcgtgatcactgttcctgaggtgatgatgttggaggcatgttcgaggatccaggaattttgcgagcagcactaccactgcgccgaaggttcgcaagaagaatgcgataag

SEQ ID NO: 20636 - DNA, 1362 bp, synthetic construct
  misc_feature 1..1362: note = source = /note="Description of Artificial Sequence: Synthetic coding sequence"
  source 1..1362: mol_type = other DNA
atggatccgtacatgatacagatgtcttcaaaaggcaatttgccttcaatcttggatgttcatgtgaatgtgggagggcgtagctctgtgcctggcaaaatgaaaggcagaaaggccagatggtcagtaagacctagcgacatggctaagaaaacatttaacccgataagggcaatcgtcgacaacatgaaagtgaagccaaatcccaacaagacgatgatctccttatcaatcggcgaccctaccgtctttgggaacctcccgacagaccctgaggtgactcaggcgatgaaagatgcactcgattcaggcaaatataacggctatgccccctccatcgggttcctttccagcagagaagaaatcgcatcatactaccattgtccagaagctcccctggaggctaaagacgtgattcttacctccgggtgctcacaggccattgatctgtgcttagctgttttggccaaccccggccagaacatcctggtgccacggccgggattctctctgtataagacactggcagaaagtatgggcattgaggttaaactgtataatctgctccctgaaaagtcatgggagatagatctgaaacagctggagtatttgattgatgagaagacagcttgcttgattgtaaacaatccgagcaacccttgcggtagtgtgttcagcaaaaggcatttacaaaaaattcttgccgtagcagcccggcagtgcgtccccattcttgcagatgagatatatggtgatatggtcttcagtgactgcaaatacgagcccctggcgactttaagtactgatgtgccgatcctgtcctgtggtggtttagccaagcgatggctggttcccggctggaggctggggtggatactgattcatgaccgtagagacatctttggaaacgagatccgggacggtctggtcaagctctcccagaggatcctaggtccttgcaccattgtgcagggtgcgttgaaatctatcttgtgccggacccctggagagttctaccacaatactctgtcattcctcaagtctaacgcagacctttgctacggcgccttggctgccattcctggacttagacctgtacgcccctcaggagcgatgtatttgatggtggggatagagatggaacatttccctgaattcgaaaacgacgtggaattcaccgagcggctcgtggccgagcagtccgtccactgcctgccagccacctgtttcgagtatccaaactttatccgcgtggtgatcacagtccccgaggttatgatgctcgaggcctgttctcgaatccaagaattctgcgagcaacactatcactgtgccgaaggcagtcaggaggaatgtgataag

SEQ ID NO: 20637 - DNA, 1362 bp, synthetic construct
  misc_feature 1..1362: note = source = /note="Description of Artificial Sequence: Synthetic coding sequence"
  source 1..1362: mol_type = other DNA
atggatccctatatgatccagatgtcgtcgaagggcaacttgccgtcaatcctggatgtgcatgtcaacgtgggcggccgctcatcggtgccaggtaaaatgaagggacgcaaggcccgctggagcgtgaggccatccgatatggcgaaaaagactttcaacccgatcagagctatcgtcgacaatatgaaggtgaaaccgaacccgaacaaaactatgatctcactgtccatcggagatcccaccgtgttcgggaacctgcccactgacccggaggtcacccaggccatgaaagatgctttggatagcgggaagtacaacggctacgcgccatccatcggcttcctcagcagccgggaagaaatcgcctcgtactaccactgccctgaagcaccgctggaagcgaaagacgtgattctgacctcgggttgttcccaggccatcgatctctgcctggccgttctggcaaatccggggcagaacatcctcgtgccgcgaccaggatttagcctctacaaaaccctggcggaatcgatgggcatcgaagtgaagctgtacaacctgttgccagaaaagtcgtgggagatcgacctgaagcagctggagtacctgattgacgaaaagacggcctgcctcatcgtgaacaacccgtcgaacccatgtggaagcgtgttcagcaagcggcatctgcagaagattttggccgtggcggcccggcagtgcgtgccgattctggctgacgaaatctacggagatatggtcttttcggattgcaagtacgagcccctggccactttgtccactgacgtgcctatcctctcatgtggcgggctcgcgaaaagatggctggttccgggatggaggttgggctggattctcatccacgatcggcgggacatctttggtaatgaaatcagagacggactcgtgaagctctcgcagagaatcctgggaccatgtactatcgtccagggcgccctcaaatccatcctctgcagaaccccaggcgagttctaccacaacactctgtccttcctgaagtcaaacgcagacctctgttacggggcactggcagcgatcccgggcctgcggccagtccgcccgtcgggggccatgtacctgatggtgggcattgagatggagcattttcctgaattcgagaatgatgttgaattcaccgaacggctcgtggccgagcaaagcgtgcactgcctcccagctacctgcttcgaataccccaatttcatccgcgtggtgatcactgtgccggaagtgatgatgctggaagcctgtagcaggatccaggagttttgcgaacagcactaccactgcgccgagggcagccaggaggagtgtgacaaa

SEQ ID NO: 20638 - DNA, 1362 bp, synthetic construct
  misc_feature 1..1362: note = source = /note="Description of Artificial Sequence: Synthetic coding sequence"
  source 1..1362: mol_type = other DNA
atggatccatacatgatccagatgtcctcgaaaggaaatctgcccagcatcctcgacgtgcacgtgaacgtgggaggtagaagctccgtgccgggcaagatgaaaggccgcaaggcgcgctggtctgtcaggccatcagatatggctaagaaaaccttcaaccccatcagagcgattgtggacaacatgaaggtcaagccgaaccccaacaaaactatgatctctctgtctatcggggatccaactgtctttggcaacttgccgaccgatccagaggtgacccaggccatgaaggacgcgttggactcgggcaagtacaacgggtacgccccgtcaataggcttcctgtcctcacgcgaagaaatcgcatcgtactaccactgtccggaggccccgctcgaagcaaaggatgtgatactgacctcaggatgtagccaagccatcgatctgtgcctcgctgtgctggcaaatccgggccagaatatcctggtgccaagaccaggcttctccctttacaagactctggccgaatcgatggggatcgaggttaagctgtacaatctgctgccggagaagtcgtgggagatcgacctgaagcagttggagtacctgatcgatgagaaaactgcctgtcttattgtcaacaatccaagcaatccgtgcggctcggtgttttccaagcggcaccttcagaaaattctggccgtcgccgcgcggcagtgcgtgccgatcctcgctgacgaaatctatggagacatggtgttctccgactgcaagtacgaaccgctcgctaccctctccaccgatgttcctattttgtcatgcggaggtttggccaagcgatggctggtgccgggatggagactgggatggatccttatccatgacaggcgcgacattttcggaaacgaaatccgcgatggactggttaagctcagccagagaatcctgggcccctgcactatcgtgcagggagctctcaagtcaatcctgtgccggactccgggtgaattctaccacaataccctgtcatttctgaagtcaaacgcagacctctgctacggagccctcgcggccatcccggggctgcgtcctgtccggccctccggagcaatgtacctcatggtcggtatcgaaatggaacatttccctgaattcgaaaacgacgtcgaattcaccgagcgacttgtggccgaacaatcagtgcactgccttcctgctacgtgctttgagtaccccaacttcatccgggtggtgatcactgtgcccgaagttatgatgcttgaggcgtgttcgcggatccaagaattctgtgagcaacattatcactgcgcggaagggtcccaagaagaatgcgacaaa

SEQ ID NO: 20639 - DNA, 1362 bp, synthetic construct
  misc_feature 1..1362: note = source = /note="Description of Artificial Sequence: Synthetic coding sequence"
  source 1..1362: mol_type = other DNA
atggatccgtatatgatccaaatgtcctcaaaaggaaaccttccgagtatactggatgttcacgtgaatgtaggcggccgctcatccgttccaggaaaaatgaaaggccggaaagccaggtggagtgttcggccaagtgatatggccaaaaaaacttttaacccaattcgtgccatcgtagataacatgaaggtgaagccaaaccctaacaagacaatgattagtctctccattggcgatccaactgtgttcggcaacctgcccaccgaccccgaggtaacccaggctatgaaagacgcactggatagcggaaagtacaacgggtacgccccatccattggatttctgtcctctcgcgaagagatcgcctcgtattaccactgtccagaggctccactggaagccaaagatgtcattctcacttccgggtgcagccaagctattgacctttgccttgcagtcttggcgaatcctggccaaaacatccttgtgcctcggcccggcttcagtttgtacaagaccctggccgagtcgatgggaatagaagtcaaactctataatttgttgcctgagaagtcgtgggaaattgatctgaaacaactggaatatctgattgatgaaaagaccgcttgtctgatcgttaataacccatctaatccgtgtggcagcgtattttcgaagcggcacctgcagaagatcttggccgtggcggctcgacagtgtgtacccatccttgcagacgaaatctacggtgacatggtcttttcagattgcaagtatgaacctctcgctacactaagcaccgatgtaccaatactgagctgcgggggtcttgccaaaagatggttggtacccggctggcgcttagggtggatcctgatccacgacagaagagatattttcggaaatgagatccgcgacggcctcgtgaaactgtcccaacgcatactgggtccatgtaccattgtccagggcgcgctgaagtctatattgtgccgaacccccggggagttctaccataacaccttgtcttttctgaagtcaaatgcagatctatgttatggagcactggctgccatccccggactccggcctgtccgcccctccggcgccatgtatcttatggttgggatagagatggaacactttcctgagtttgagaacgacgttgagttcaccgaacgtttggtggccgagcagagcgtgcactgtctgccagccacctgttttgagtacccgaacttcattagggtcgttatcaccgtgccggaagttatgatgctggaggcctgttccagaattcaggagttctgtgagcagcactatcattgtgccgagggttcccaagaagaatgtgataag

SEQ ID NO: 20640 - DNA, 1362 bp, synthetic construct
  misc_feature 1..1362: note = source = /note="Description of Artificial Sequence: Synthetic coding sequence"
  source 1..1362: mol_type = other DNA
atggatccttacatgattcaaatgtcctctaaaggcaatctcccatctatcctcgatgtgcacgttaatgtgggtggccggtcttctgtaccaggaaaaatgaaggggcgtaaagcaaggtggagcgtgagaccatccgacatggccaagaagacatttaacccgattcgcgcaatagtggacaacatgaaggtgaagccaaaccctaacaagacaatgatttccctgtcaataggggatcccacggtcttcggaaatctgccgacagatccagaggtgacacaggctatgaaggacgccctcgacagcggcaagtataatggctacgctccgtctattggatttttgtcgtcccgcgaggagatagcctcgtactatcattgcccggaggccccactggaggcaaaggacgttattctgaccagcgggtgctcgcaggccatagacctgtgtctggctgtgttggctaatccaggccagaatatcctcgtccctagacctgggttctccctgtataagaccctggccgagtccatgggcatcgaggttaagctgtacaacctgctgccagagaagagctgggagatcgacttgaagcagctggaatacctgattgacgagaaaaccgcttgcctaattgtgaataatcctagcaacccatgcggctccgtgttctctaagaggcatcttcaaaagatcctcgctgtggctgcgcggcagtgtgtgcctatcctggctgatgagatctacggcgatatggttttctcagactgtaagtacgagcccttagcaaccctgtctacagacgtccctattctctcttgtggcgggctcgccaagagatggctggtcccaggatggagactcgggtggatactgatccacgacagaagggacatctttggcaacgagatccgagatggcctggtcaagctatctcagagaattctgggcccgtgcacaatagtccagggcgcacttaagtccatcttgtgcagaacacctggagaattttaccataacactcttagtttcctcaagtccaacgccgatctgtgctatggagccctggccgccattccgggcctcaggcccgtgcgaccttccggagccatgtatctgatggtggggatagagatggagcacttccctgagttcgaaaacgacgttgaattcacggaaaggctggttgcggagcaaagcgtgcactgtctgcccgctacatgcttcgaataccctaacttcattcgtgtggtgatcaccgtccctgaggtgatgatgcttgaggcttgttctaggatccaggagttctgcgagcaacactaccactgtgccgaaggttctcaggaggaatgcgataag

SEQ ID NO: 20641 - DNA, 1362 bp, synthetic construct
  misc_feature 1..1362: note = source = /note="Description of Artificial Sequence: Synthetic coding sequence"
  source 1..1362: mol_type = other DNA
atggatccttacatgatccagatgtccagcaagggcaaccttcctagcattctagatgtgcatgtgaacgtggggggacgcagctctgtgcctgggaagatgaagggtaggaaagcacgttggagcgtgcggccttcagacatggccaagaagaccttcaatcccattcgcgccattgtcgataatatgaaggtgaaacctaacccaaacaagactatgatttcccttagtattggcgaccctacagtgttcggcaatctgccaactgatcctgaagtgacgcaggcaatgaaggatgctctggacagcggaaagtataacggctacgcaccttctatcggattcctctcttcccgagaagagattgcctcgtattaccattgcccggaagctcccctggaagccaaggacgttatactgaccagcgggtgctctcaggccatagacctgtgcctcgccgtgctggcaaacccaggccaaaacatcctagtgccaagaccaggcttttcactttacaagacactagctgaatcaatggggatcgaagtcaaactgtataaccttctccctgagaagtcctgggaaatcgatctgaagcagctagagtacctcatcgatgaaaagacagcttgcctgattgtgaacaatccctcaaacccgtgtgggtctgtgtttagtaaacgacatttacaaaagatcctagccgtggccgcgcgacagtgcgtgcctatcttggccgatgaaatctacggcgacatggtgttcagcgactgtaaatacgagccactggccacgctctcgaccgacgttcccatcctatcctgtggcggactggctaaaaggtggctggtgccaggctggcggctgggttggattttaatccacgatagaagagatatcttcgggaatgagatccgagatggtctcgtgaagctgtctcagaggatcttgggcccgtgtacgatagtacagggcgcactgaagtccatactgtgtcggactcccggagagttctaccataacacgctgagctttttgaagagcaatgcggacttatgctatggcgctctggcagctatcccagggctccgccctgtgcgtccgagtggtgctatgtatctcatggtgggcattgagatggagcactttccagagttcgagaacgacgtggagtttaccgaacgcctggtagccgaacagtccgtgcactgcctccctgctacatgctttgagtaccctaatttcatccgggtcgtgatcactgttccagaggtgatgatgctggaagcgtgcagccgcatccaagaattctgtgagcaacactaccattgcgcggaaggatcgcaagaagaatgtgataag

SEQ ID NO: 20642 - DNA, 1362 bp, synthetic construct; identical to SEQ ID NO: 20622
  misc_feature 1..1362: note = source = /note="Description of Artificial Sequence: Synthetic coding sequence"
  source 1..1362: mol_type = other DNA

SEQ ID NO: 20643 - DNA, 1362 bp, synthetic construct
  misc_feature 1..1362: note = source = /note="Description of Artificial Sequence: Synthetic coding sequence"
  source 1..1362: mol_type = other DNA
atggatccgtatatgatacaaatgtcgtcgaaaggtaatctaccgtcgatattagatgttcatgttaatgtaggtggtcgttcgtcggtaccgggtaaaatgaaaggtcgtaaagcgcgttggtcggttcgtccgtcggatatggcgaaaaaaacgtttaatccgatacgtgcgatagtagataatatgaaagtaaaaccgaatccgaataaaacgatgatatcgctatcgataggtgatccgacggtatttggtaatttaccgacggatccggaagtaacgcaagcgatgaaagatgcgctagattcgggtaaatataatggttatgcgccgtcgataggttttctatcgtcgcgtgaagaaatagcgtcgtattatcattgtccggaagcgccgttagaagcgaaagatgtaatactaacgtcgggttgttcgcaagcgatagatctatgtctagcggtattagcgaatccgggtcaaaatatattagtaccgcgtccgggtttttcgctatataaaacgttagcggaatcgatgggtatagaagtaaaactatataatttattaccggaaaaatcgtgggaaatagatctaaaacaattagaatatttaatagatgaaaaaacggcgtgtttaatagttaataatccgtcgaatccgtgtggttcggtattttcgaaacgacatctacaaaaaatactagcggtagcggcgcgacaatgtgttccgatactagcggatgaaatatatggtgatatggttttttcggattgtaaatatgaaccgttagcgacgctatcgacggatgtaccgatactatcgtgtggtggtctagcgaaacgttggttagtaccgggttggcgtttaggttggatactaatacatgatcgtcgtgatatatttggtaatgaaatacgagatggtttagtaaaattatcgcaacgtatattaggtccgtgtacgatagtacaaggtgcgttaaaatcgatattatgtcgaacgccgggtgaattttatcataatacgttatcgtttttaaaatcgaatgcggatctatgttatggtgcgctagcggcgataccgggtctacgtccggtacgaccgtcgggtgcgatgtatttaatggttggtatagaaatggaacattttccggaatttgaaaatgatgtagaatttacggaacgactagttgcggaacaatcggttcattgtctaccggcgacgtgttttgaatatccgaattttatacgtgttgttataacggttccggaagttatgatgttagaagcgtgttcgcgtatacaagaattttgtgaacaacattatcattgtgcggaaggttcgcaagaagaatgtgataaa

SEQ ID NO: 20644 - DNA, 1362 bp, synthetic construct
  misc_feature 1..1362: note = source = /note="Description of Artificial Sequence: Synthetic coding sequence"
  source 1..1362: mol_type = other DNA
atggacccctacatgatccagatgagctccaagggtaacctgccgtcgatcctggatgtgcacgtgaacgtgggagggcgttcttcagtgccagggaagatgaagggacggaaagcccggtggagcgtgaggccctcagacatggccaaaaagaccttcaaccctatcagggctatcgtcgataacatgaaggtgaagccgaacccaaacaagaccatgatctcactgtcaatcggcgatccgaccgtattcggaaacctccccacggacccagaagtcacccaagccatgaaagatgcgctcgatagcgggaagtataatggatatgcaccgtccatcggctttctttcatcgagagaggaaattgcgagctactaccactgtccagaagcccctctggaagcaaaggacgtgatcctcacttccggatgctcacaggccatcgatctgtgcctcgcggtgcttgcgaacccgggacagaacattctggtgccgcggccgggattctcgctctacaagactctcgccgaatcaatgggcatcgaggtgaagctgtacaatctcctgccagagaagtcctgggaaatcgacctgaagcagcttgagtacctgatcgacgaaaagaccgcttgcctcatcgtgaataacccctccaatccgtgcggatcagtgtttagcaaacggcaccttcagaaaatcctcgccgtggctgccagacagtgcgtgccgatcctggcagacgaaatctacggagatatggttttctccgactgcaagtacgaacccctggctaccctttccacggacgtgccaatcctcagctgtggaggcctcgcgaaaagatggctggtccctggctggcgacttgggtggatcctgatccacgatcgccgcgatatcttcggcaacgagattagagacggcctggtgaaactgtcccaacgaattctcggaccatgcaccatagtgcagggtgccctgaagtcgatcctctgccgcacgccgggggagttttaccataataccctgagctttctcaagtccaacgcagacctgtgctacggggcactggccgcgattccgggactccggccggtgcgcccaagcggagccatgtacctgatggtcggaatcgaaatggaacacttcccagagttcgaaaacgacgtggaattcaccgaaaggttggtggctgaacaatccgtgcattgcctgccggctacctgctttgaatacccgaatttcatccgggtggtgatcaccgttcctgaggtcatgatgctggaagcatgctcccggatccaggaattttgtgaacagcattatcattgtgcggaaggatcccaagaggaatgcgacaag

SEQ ID NO: 20645 - DNA, 1362 bp, synthetic construct
  misc_feature 1..1362: note = source = /note="Description of Artificial Sequence: Synthetic coding sequence"
  source 1..1362: mol_type = other DNA
atggatccctacatgattcagatgagctcgaagggaaacctccccagtatcctggacgtccacgtgaacgtgggcggaaggtcttccgtcccgggcaagatgaagggccgtaaggccaggtggtccgtccggccctccgatatggccaagaagacctttaaccctatccgtgctattgtggacaatatgaaggttaaacccaatcccaacaagaccatgatttcattgtccatcggcgatcctaccgtgtttgggaacctgccaacagatcccgaggtgacacaggctatgaaggacgcgttagactccggtaagtataatggctatgccccttcaattggattcctctcgtctagggaggagattgcttcctattaccattgtcctgaggcccccctagaggccaaagacgtgatactcacaagcggatgcagccaggcgatcgacctctgcttggccgtcctagccaatcccggccagaacattctggtcccacggcccggattcagcctctataaaactctcgccgaatcaatggggatcgaggtgaaactatacaatctgctgcccgagaagtcttgggaaattgatttgaaacagctggagtacctgatcgatgagaagacggcttgtctgatcgttaataacccgtcaaacccatgtgggtcggtattcagcaaacgccacctccagaaaattttagcggtcgcagcccgtcagtgtgtgcccattctggcggatgagatctatggcgacatggtgttcagcgattgcaagtacgagccactggctacactgagtaccgatgttcccatactctcttgcggaggtcttgccaaacgatggctagtccccggctggagattaggctggatcttaattcacgatcgcagagacatcttcggcaacgagattcgagacggcctagtgaaactcagtcagcggatacttggcccatgtaccatcgttcaaggggcattaaagagtatcctctgtcgcactcctggggagttttatcacaataccctgagctttctgaaaagcaacgccgatctctgttatggggctttagcagcaattcctggtttgaggcctgtcaggcctagcggagccatgtatctgatggtaggcatcgaaatggagcatttcccagaattcgaaaacgatgttgagtttaccgagcgccttgtcgcagagcagtccgtgcactgtctgcccgctacctgttttgagtacccaaacttcattcgggtagtgattacagtgcccgaggttatgatgctggaagcgtgcagcagaatccaggagttctgcgagcagcattaccactgtgccgaggggagccaggaggagtgtgataag

SEQ ID NO: 20646 - DNA, 1362 bp, synthetic construct
  misc_feature 1..1362: note = source = /note="Description of Artificial Sequence: Synthetic coding sequence"
  source 1..1362: mol_type = other DNA
atggacccgtacatgatacaaatgtctagtaaaggtaatcttccaagcatcctggacgtccatgtcaacgtgggtggcagaagcagcgtgccaggcaagatgaagggccgcaaggcccggtggagcgtgcgcccatcagatatggccaagaagaccttcaacccgatacgagccattgtagataacatgaaggtgaagcccaaccccaacaagactatgatcagcctcagcatcggagatcctacagtgttcggcaatctgccaactgatccagaagtgacccaggcaatgaaggacgctttagatagcggcaagtacaacggctacgcgccatcaatcggcttcctatcatcgagggaggaaatagcatcttactatcattgtcctgaggcgcccctcgaagctaaggacgtcatcctcaccagcggatgcagccaggccattgacttgtgccttgctgttcttgcaaacccaggccagaatatccttgtaccgaggcccggcttcagcctgtataagactttggcagagtccatgggcatcgaggtcaagctctataacctgctgcccgagaaatcctgggagattgaccttaagcaactggaatacttgatagatgaaaaaaccgcatgcctgatcgtgaacaatcctagcaacccttgcggaagtgtgttctctaaacgtcacctgcagaagattttggccgtggccgctcggcaatgtgtccctatcttggccgacgagatttatggagatatggtctttagcgactgtaagtacgagcccctggctactctttcaactgacgtgcctatcctcagctgtggtggcctcgctaaacgctggctggtacctggatggaggctggggtggattttgatccatgacaggagggatatttttgggaacgaaatccgcgatggcctggtcaaactcagccagcggatcctggggccatgcacaattgtccaaggggcgcttaaatcaatcttgtgcaggactccaggtgagttttaccataacaccctgagttttttgaagtctaacgcggacttgtgctatggagcacttgccgctatccctggcctgcggcctgtgcgtccgtccggtgccatgtatcttatggtgggcattgaaatggagcattttcctgagttcgagaatgacgtggagttcaccgaacgcctcgtcgcagagcagagcgtgcattgtctgcctgcaacatgctttgagtatcccaactttattagggtggtgattactgtgcctgaggtgatgatgctggaagcttgcagtcgtatccaggagttttgtgaacagcattaccactgcgccgaaggaagccaagaggaatgtgacaaa

SEQ ID NO: 20647 - DNA, 1362 bp, synthetic construct
  misc_feature 1..1362: note = source = /note="Description of Artificial Sequence: Synthetic coding sequence"
  source 1..1362: mol_type = other DNA
atggatccctacatgattcaaatgtcgagcaagggtaacctcccgtccatactagacgtgcacgttaatgtgggtggtaggtccagtgttcccggcaagatgaaaggtcggaaggcccggtggtcggtgcgtccttcggacatggccaagaaaacgtttaatcccattcgcgccatagtcgataacatgaaggtgaaaccgaatccgaacaagaccatgatatcgctgagtatcggtgatccgaccgtgttcggcaacctgccgaccgatcccgaggtgacgcaggccatgaaggatgccctagactccggcaagtacaatggatacgcgccctcgatcggattcctgtcatcgcgagaagaaatcgcctcatactaccactgccctgaggcccccttggaggcgaaagatgttatcctgacctcgggttgctcccaagccatcgacctctgtctcgccgtgctcgcgaatcccggacaaaatattctcgtgccacgcccaggcttcagcctctataaaacgttggcggagtctatgggcattgaggtcaagttgtacaatctgctgcccgaaaagtcctgggaaattgacctaaagcaattggagtatctgattgacgagaagaccgcttgcctgattgtcaacaatccatcgaatccttgcggatcggtgttcagtaagcgacatttgcaaaagatccttgccgtcgcagcccgacaatgcgtgccaattttagcggacgagatctatggtgacatggtgttctcggactgcaaatacgaacccctggccacactatccacggacgtgcctatcctgtcctgcggtggcctggcaaagcgttggttagtcccaggctggcggcttggttggatcttaattcacgaccgcagggatatcttcggcaatgagattcgggatggtctcgtgaaattgtcgcagaggattctagggccatgcacaattgtgcagggagccctgaagagtattctttgccggacccccggagagttctaccacaatactctgtccttcctgaagtccaatgcggacctgtgctatggcgcgctggcagccattccgggccttaggccggtaagaccgtcgggggctatgtatctgatggtcggtatagaaatggagcactttcccgagtttgaaaatgacgtggaattcaccgaaaggctggtggctgaacagagcgttcattgcctccctgccacgtgtttcgagtaccctaatttcattcgcgttgtcatcacagttccagaggtgatgatgctggaggcctgctcgagaattcaggagttttgcgagcagcattaccactgcgcagaaggcagtcaggaagagtgcgataag

SEQ ID NO: 20648 - DNA, 1362 bp, synthetic construct
  misc_feature 1..1362: note = source = /note="Description of Artificial Sequence: Synthetic coding sequence"
  source 1..1362: mol_type = other DNA
atggatccctacatgattcagatgtcgtccaagggcaatttgccttcaatactggatgtgcatgtcaatgtgggtggaaggtcctcggtgccaggcaaaatgaagggaagaaaagctcgctggtccgtgaggccttcagatatggcaaagaaaacctttaaccctatacgagccatagtggataacatgaaggtgaagccaaaccctaacaagaccatgatcagcttgagcatcggagatccaactgttttcggaaacctgccaactgatcctgaagtgacccaggcaatgaaagatgcacttgattccggtaagtacaatggatacgcaccctcgattggtttcctctcctcacgcgaggaaatcgcaagctactaccattgcccagaagcgcctctggaagctaaggatgtgatccttaccagtggttgttcacaagctattgacctttgtctggctgtccttgcaaaccctggacaaaacatactggtgcctcggcccgggtttagcttgtacaagaccctggcggaatcgatgggaattgaagtcaagctctacaatcttctcccagagaagagctgggaaatcgatcttaaacaattggaataccttattgacgaaaagacggcttgcctgatcgtgaacaacccatcgaatccttgtggatctgtgttcagcaagcgccatctgcagaagattctggccgtggcagcaagacaatgcgtgcctattctggcggacgagatttacggagatatggtgttctccgattgtaagtacgaacctctggcaactttgtcaactgatgtgcctattctttcatgcggcggtcttgcgaaacgttggcttgtcccaggttggagactcggttggattcttatccatgaccggcgcgacattttcgggaacgaaattagagatggactggttaaactgtcgcaacgcattcttggaccttgcactattgtgcaaggagccctgaagagcattctgtgtcggactccaggtgaattctaccataacactctttccttcctgaagtcaaacgcagacctctgttacggggcacttgcagcaatccctggcttgcgtcctgttcgccccagcggggcgatgtacctcatggtgggcatcgagatggagcattttcccgaatttgaaaatgatgtggaatttactgaacgcctggtcgcggaacagtccgtgcactgcctgcccgcaacctgttttgaatacccgaatttcattagagtggtgataactgtccctgaggtcatgatgctggaggcctgctcacgcattcaggaattctgtgaacagcattatcattgtgctgaaggtagtcaagaagaatgtgataag

SEQ ID NO: 20649 - DNA, 1362 bp, synthetic construct
  misc_feature 1..1362: note = source = /note="Description of Artificial Sequence: Synthetic coding sequence"
  source 1..1362: mol_type = other DNA
atggacccctatatgatacagatgtcttccaagggcaacctcccatcaattctggacgtacatgtgaacgttggtggccgctcaagtgtgccaggtaaaatgaagggcaggaaagctagatggtctgtaagaccgtctgatatggcaaagaagaccttcaatccgattagagctatcgtggataacatgaaggtaaaacctaatcccaacaagacaatgatctcactctctatcggagaccccacagtgttcggcaatctcccaactgatcctgaagtaacacaggctatgaaggatgcattggactctggcaagtataacggctatgcaccttccataggttttctgtcctcacgcgaggaaatcgcatcttactaccattgccccgaggccccccttgaagccaaagacgttattctgacgtccggatgttcccaagccatagatctttgcctggctgtcctcgccaacccgggccagaacatcctggtgccccgccccggctttagtctctataaaacattggctgagtctatgggtatagaggtcaaactttacaatctgcttcccgagaaatcttgggaaatcgatttgaaacaactcgaatatctgattgatgagaaaactgcctgcctgatcgtgaataacccatcaaacccatgcggctccgtcttcagcaagagacacctgcaaaagatcttggccgtggccgcacgccaatgcgtgcctattcttgccgacgagatctacggtgacatggtattctccgactgtaagtacgaaccgctggctactctctccactgatgtgcctatcttgagctgcggaggactggcaaaaaggtggttggtgccaggctggagacttggctggattctgattcatgaccgcagggacatcttcggcaacgaaatcagagatggtctggtgaagctgtcccagagaatcctgggcccctgcacaatagtacagggagctctcaagtccattctgtgcaggaccccaggagaattctaccataatactctgtcattcctgaaatctaacgctgatctttgctatggtgcgctcgccgccatcccgggccttaggcccgttcgcccgagtggagccatgtatctcatggtcggcattgagatggagcatttcccagagttcgagaacgacgtggagttcaccgagaggctcgtggctgaacaatccgtgcattgtctccctgctacatgcttcgagtatcctaactttattcgcgtggtgattactgtgcctgaggttatgatgctggaggcctgctcacgcattcaggagttctgcgagcagcactaccattgtgccgagggctcacaggaagaatgcgacaaa

SEQ ID NO: 20650 - DNA, 1362 bp, synthetic construct
  misc_feature 1..1362: note = source = /note="Description of Artificial Sequence: Synthetic coding sequence"
  source 1..1362: mol_type = other DNA
atggacccatacatgatacagatgtcatcaaagggcaaccttccgtctatcctggatgtgcacgtgaacgtcggcgggagatcgtccgtccctggcaaaatgaagggaagaaaagctcgctggagcgtcaggccctctgatatggccaagaagaccttcaatcccatcagggcaattgtggataacatgaaggtgaaacctaacccaaacaaaaccatgatatcattgagcattggcgatcccaccgtctttggcaacctacctactgatcccgaggtgacacaggccatgaaagacgctctggatagtggcaagtacaacgggtacgctcccagtatcgggttccttagtagccgcgaggaaattgcatcttattaccattgccccgaggctcctctggaagcaaaagacgtgattctgacctctggatgctcccaggccattgatctgtgcttggccgtcctggcaaacccaggacagaacatactagttcccaggccaggctttagcctgtacaaaaccctcgccgaatcaatggggatcgaggtgaagctttataatcttctgccagaaaagagctgggaaattgatctgaagcagctggagtatcttattgatgagaaaactgcctgcctgattgtgaataatccgtcaaacccttgtgggtccgtcttctctaaaagacatttgcagaagatactggccgtagcagcccgccaatgcgtgccgattttggctgatgagatttacggggatatggtgttctccgactgtaagtacgaacccctggctaccctgtccacagacgttcccatcctgagttgcggaggacttgccaaacggtggctggttcctggctggcggttggggtggatcttgatacacgataggcgcgatatcttcggaaatgagattcgagacggcttggttaagttgtcgcagagaatcctcggcccttgtactatcgtgcagggcgctctcaaaagcatattatgtcgcacacccggggaattttaccacaacactctgagtttcctgaagtctaacgccgatctatgttacggagccctggccgcaattcctgggcttcggccagtacgcccgtcgggggctatgtacctgatggtcgggattgagatggagcactttccagagttcgaaaacgatgttgagttcaccgaacgcctggtcgcagagcagtcagtccactgtctacccgcaacttgtttcgagtatcccaattttattcgggtggtgattacagtccccgaagtcatgatgctggaagcttgctctagaatccaggagttttgtgagcaacattaccattgtgccgaggggtcccaagaggagtgcgacaag

SEQ ID NO: 20651 - DNA, 1362 bp, synthetic construct
  misc_feature 1..1362: note = source = /note="Description of Artificial Sequence: Synthetic coding sequence"
  source 1..1362: mol_type = other DNA
atggatccttacatgatccaaatgtcctcaaaggggaatcttccttccatacttgatgtccatgtgaacgtgggaggtcgctcgtcggtccccggaaagatgaaaggccgaaaggcacgctggtctgtgaggccgtccgacatggcaaagaaaacgttcaatcctattcgggccatcgtggataacatgaaggtcaagcctaatcctaacaagaccatgatttcgttgtcgatcggagatcctactgtgtttggcaatcttcctactgatcccgaagtgactcaggcgatgaaggatgcccttgattctggtaagtacaatggctacgcaccttcgataggctttctcagcagccgtgaagagattgcgtcatactaccactgtcctgaagctccccttgaggccaaagatgtgattctgacttcaggttgtagccaagcaattgatttgtgtcttgcagtcttggcgaatcctgggcagaacatactggtgccaagaccaggtttctcgctgtacaagactctggcagaatccatgggaatcgaagtgaaattgtacaacttgctgcctgaaaagtcatgggaaatcgacctcaagcaactggagtaccttattgatgaaaaaaccgcatgtctcatagtgaacaacccatcaaacccatgtggatcagtgttttccaaaagacacctgcaaaagattcttgccgtcgcggcacgacagtgtgtgcccattctggcggacgagatttacggggacatggttttcagcgactgtaagtatgaaccccttgcaaccctttccaccgatgtaccaatactttcctgcggaggtctggctaaaaggtggcttgtccctggttggaggctgggctggattctcatacacgacagaagagatatcttcggcaacgagatacgagacggactggtcaagctgtcgcagcgcattttgggtccctgtactatagtgcagggtgcactcaagtccattctttgcagaactccaggcgaattctaccacaacaccttgtcctttcttaagtcgaatgcggatctttgctacggcgcattggccgccatacccgggctccgtccggtcagacccagcggagcaatgtacctcatggtcggtattgaaatggaacactttcctgaattcgaaaatgatgttgagttcactgaacgactggtggccgagcagtctgtccactgtctgccagcaacttgcttcgagtatccaaacttcattcgggtggtgattacggtcccagaagtcatgatgctcgaggcatgctcgagaatccaggaattttgtgaacagcattaccattgtgctgaaggtagccaagaggaatgtgataag

SEQ ID NO: 20652 - DNA, 1362 bp, synthetic construct
  misc_feature 1..1362: note = source = /note="Description of Artificial Sequence: Synthetic coding sequence"
  source 1..1362: mol_type = other DNA
atggacccctacatgatccaaatgtcctctaaaggtaacctgccgtccatattggacgtgcacgttaatgtgggtggacgatcaagtgtgcctggaaaaatgaagggccgtaaggccagatggtcagtgcggccctccgacatggctaaaaagacttttaaccctattcgagccattgtagataatatgaaagtgaaaccgaacccaaataaaacaatgatctcgctgagcatcggcgaccccactgtttttggtaatcttccaaccgaccctgaggtgacacaggctatgaaggatgctttagactcggggaagtacaacggatatgctccaagcatcggatttctttcaagtagagaggagattgcatcttattaccattgcccagaggctcccctggaggccaaggacgtgatactgacctccgggtgctcacaggctatcgatctgtgcctcgccgttctagctaaccctggccagaatatccttgtgcctagaccaggatttagtctgtacaagactctggcagaatccatgggcatcgaggtcaagctctacaacctgctgcctgagaagtcatgggaaatcgacttgaaacagcttgaataccttatcgacgagaagactgcatgtcttattgtcaacaatccttctaacccttgcggcagcgtgttctccaagcgtcacctgcagaagatactggccgtggccgcccgacagtgtgtgcccatcctcgctgacgaaatttacggcgacatggttttcagtgattgtaaatacgaacctctggctacccttagtacagacgtccctatcttgagttgcggggggctagccaaaaggtggctcgtccccggctggcgtctaggatggattcttatccacgaccgcagagatattttcggaaatgagataagggatggcctggtgaagctcagccagcggatactgggaccttgtacaatcgtccagggggcgttgaagtccattctgtgcaggacccctggggagttctatcacaacacattgtcttttctgaaatcgaatgcagatttgtgctacggagcattagccgccattcctggattgcggcctgtcaggcctagcggagccatgtatttaatggtgggaatagagatggagcactttccagaatttgaaaacgacgtcgagttcacggaaaggctggtggccgaacagtcagtgcactgcctacccgctacctgcttcgagtatcctaattttattagagttgtgataacagtgcctgaggtgatgatgctggaagcttgttctaggatccaagagttttgcgagcagcactaccactgcgcagagggtagccaggaggagtgtgacaag

SEQ ID NO: 20653 - DNA, 1362 bp, synthetic construct
  misc_feature 1..1362: note = source = /note="Description of Artificial Sequence: Synthetic coding sequence"
  source 1..1362: mol_type = other DNA
atggatccctacatgatacagatgtcatcaaagggcaacttgccatccatcctcgacgtccacgttaatgtaggcggtcggtctagcgtgccaggcaagatgaagggcagaaaagccagatggagcgtgaggccctctgacatggctaagaaaacatttaacccaatccgtgctatcgtcgacaatatgaaggttaagccaaatcccaacaaaactatgattagtcttagcatcggcgaccccacagtgttcggaaaccttcctaccgaccccgaagtgacgcaggctatgaaggatgccctcgattctggtaaatataacggctatgcgccatctatcggcttcttgtcttcaagagaggaaattgcgagttattaccattgccctgaggcaccactggaagccaaggatgttattctcacatctggctgttcacaggcaatcgacctgtgcctagctgtgctggccaaccctgggcagaatatcctggtgcccaggccgggcttttccctttacaaaacgctcgcggagagtatgggaattgaagtgaagctatataacctcctgcctgagaagtcatgggagatagatttgaaacagcttgaatacctgatcgatgagaagaccgcatgcctgatagtcaacaatccatccaacccctgcgggagcgtgtttagtaaacggcacttgcagaagatcctggcagtggcagcacggcagtgtgtacctattctggccgacgagatctacggagatatggttttctctgattgtaaatacgagccccttgcaacccttagtaccgatgttcccattctgtcctgtggcgggctggctaagcgctggctggtccctggttggagactgggttggatcctgattcacgatcgcagggacattttcggcaacgaaatacgggacggactcgttaagttatctcagcggattctgggcccctgtactatcgtccagggagcactgaagtcaattctctgtagaactcccggggagttctaccacaatacactgagctttttgaaaagtaatgccgacctttgctatggcgcgctggctgcgatccccggcctgcggccagtgagacccagcggagcaatgtacctcatggtcggaatcgagatggagcattttcctgagtttgaaaatgacgttgaatttacagagagacttgtggcagaacagagcgtccattgcctccccgccacttgctttgaatacccaaattttatacgagtggtgattacagtgcccgaggtaatgatgctggaagcctgttcgagaatccaggagttttgcgaacagcactatcattgtgcagaaggatcccaagaggaatgtgacaaa

SEQ ID NO: 20654 - DNA, 1362 bp, synthetic construct
  misc_feature 1..1362: note = source = /note="Description of Artificial Sequence: Synthetic coding sequence"
  source 1..1362: mol_type = other DNA
atggatccttatatgatacagatgagctcaaaaggtaacctgcccagtatcctggacgtgcacgtgaacgtaggggggcggtcaagcgtgcccggcaaaatgaagggtcggaaggcacgatggtccgtccggccttcagatatggctaaaaagacttttaaccctatccgtgccatcgtggataatatgaaggttaagccgaacccgaataagacaatgataagtttgtcgattggagatcccacagtgtttggaaatcttccaactgatccagaagtaacccaggcaatgaaggacgcattggactctgggaagtataatgggtacgcaccctccataggctttctgtcttcaagagaggagatcgcgagctactatcattgccctgaggccccccttgaggccaaggatgtcatactcacctcggggtgtagccaggccatcgacctatgcctggctgtgctcgccaaccctggtcaaaacattcttgtgccgaggccaggcttcagtctttacaagaccttagccgaaagtatgggtattgaagttaagttgtataacctcctcccagaaaaaagttgggagatagaccttaagcaactggagtatctgatagatgagaaaacggcctgtttgatcgttaacaacccatccaatccatgtggatccgtctttagcaagcgccatctccaaaagatcctggcagtcgcagcgcggcagtgcgtgccgattcttgcagacgagatttatggcgacatggtatttagcgattgcaagtatgagccattggcaaccctcagcacggacgtgcctatcctcagctgcgggggactggcaaagcgctggctggtgcccggctggcggctgggctggatcctgattcacgatagacgggatatcttcgggaatgagattcgcgacggactagttaaactatcccaaaggattttgggcccctgcacgattgtccagggtgccttgaagtccatactgtgtaggacacctggagaattttaccacaacactctgagtttccttaagtctaacgccgacctttgctacggagcattggccgcaatccctggcctgagaccggtgcgcccaagtggtgccatgtatttgatggttgggattgagatggagcatttccctgagtttgagaatgatgtcgagttcacagaacgactagtcgccgagcagtcagtccactgtctccctgctacttgcttcgaatatcccaattttatccgagttgtaatcacggtacccgaagtaatgatgcttgaagcctgttctaggatccaggagttctgcgagcagcactaccactgcgcggaggggtcccaagaagagtgcgacaag

SEQ ID NO: 20655 - DNA, 1362 bp, synthetic construct
  misc_feature 1..1362: note = source = /note="Description of Artificial Sequence: Synthetic coding sequence"
  source 1..1362: mol_type = other DNA
atggatccgtatatgatccagatgtcctccaaaggaaacctgcccagcatccttgatgtgcatgtgaacgtcggaggacggtctagtgtgccgggaaagatgaagggacggaaggcccggtggagtgtgcggccgtccgacatggctaagaaaaccttcaatcccatcagggccattgtggacaacatgaaagtcaagccgaacccaaataagaccatgatctcactgtcgatcggagatccgaccgttttcggtaacttgccgaccgacccggaagtgactcaggcgatgaaggatgccctcgacagcggaaagtacaacggatacgcaccatccatcggattcctgagctcgcgtgaagagatcgcctcctactaccactgcccggaggccccactcgaagccaaggacgtgatcctgacgagcggatgctcccaagcaattgacctgtgccttgccgtgctcgcaaacccaggccagaacatcctcgtgccgcgccccggattctccctgtacaagactctggccgaaagcatgggaatcgaagtgaagttgtacaatctgctgccagagaagtcgtgggagatcgatcttaagcaactggagtacctgatcgacgaaaagaccgcatgtctgatcgtgaataatccttcgaacccatgcggatcggttttttctaagcgccacctccaaaagatcctggctgtcgcagcgcgacaatgtgtcccgatcctggcggacgagatctacggagatatggtgttttctgactgcaaatacgaacctctcgcgactctttcaactgacgtgcctatcctgtcatgtggtggattggcaaagaggtggctcgtgccgggctggcggctggggtggatcctcattcacgacagaagagatatcttcggcaatgagatcagagatggacttgtgaaactgtcgcaacggattcttggcccgtgtactatcgtccagggtgcgcttaagtccatcctctgccgcaccccgggcgagttctaccataacactctgagcttcctgaaaagcaacgcggatctgtgttacggggctctggccgcgattccgggtctgcgcccggtgcggccatcgggagcgatgtacttgatggtgggcatcgagatggaacacttcccggagtttgaaaacgacgtcgaattcaccgagcggctcgtcgcggagcaatccgtgcactgtctgcctgcaacctgcttcgagtacccgaacttcatccgcgtggtgattactgtcccggaagtcatgatgctggaagcatgcagcaggatccaggaattctgcgaacagcactaccactgtgcagaaggatcccaggaggagtgtgacaaa

SEQ ID NO: 20656 - DNA, 1362 bp, synthetic construct
  misc_feature 1..1362: note = source = /note="Description of Artificial Sequence: Synthetic coding sequence"
  source 1..1362: mol_type = other DNA
atggacccttacatgatccagatgtcgtccaagggaaatctgcctagcatactcgatgtgcacgtgaacgtgggtggtcgaagctcggtgccagggaaaatgaagggcagaaaagctcgctggagtgttcgcccgtcggatatggcaaagaaaactttcaatccgatcagggccattgtcgacaacatgaaagtaaagccgaacccaaacaagactatgatctcgctgtctattggcgacccaactgtgttcggaaacctcccaaccgacccagaggtgacccaagctatgaaagatgccctggatagcgggaagtacaacggttacgctccatccatcggtttcctctcgagccgggaagaaattgcctcatattaccattgcccagaagcgccgctggaagccaaagatgttattctcactagcggatgctcgcaggcgatcgacctgtgcctcgcggtgttggctaatccaggacagaacattctcgtcccgaggcccggcttctccctctacaagaccctggcggagtccatggggattgaggtgaaactgtataacttgctccccgaaaagtcttgggagatcgatttgaagcagctggagtatctcatcgacgagaaaaccgcgtgcctgatcgtgaataatccttctaatccgtgcggatcggttttctcgaagcgccatcttcagaaaatcctggcggtggcagcccggcaatgcgtgccgattttggctgatgaaatctacggcgacatggtgtttagcgattgtaagtacgagcctctggcaacgctgtcaaccgatgtgccgatcctcagctgtggaggtctggcgaagagatggcttgtgccagggtggcggctggggtggatccttatccacgatcgccgcgacatcttcggaaacgaaatcagagacggcctcgtcaagctgagccagcgcatccttggcccgtgtactatagtgcaaggtgcactcaagtccatcctctgtcggaccccgggagagttctaccataataccctctccttcctgaaatcaaacgccgatctttgctacggcgccctggctgccatcccagggctccggcctgtccgccccagcggcgctatgtacctgatggtcggaattgaaatggaacacttccccgagttcgaaaacgatgtggaattcaccgagagactcgtggccgaacaaagcgtgcactgcctcccagccacctgtttcgaatacccgaatttcatccgcgtggtgattaccgtgccggaggtcatgatgttggaggcctgtagccggatccaggaattctgcgaacaacactaccattgtgccgaaggatcacaggaagagtgcgacaag

SEQ ID NO: 20657 - DNA, 1362 bp, synthetic construct
  misc_feature 1..1362: note = source = /note="Description of Artificial Sequence: Synthetic coding sequence"
  source 1..1362: mol_type = other DNA
atggatccttacatgattcagatgagcagcaaaggtaacctgccatctatactggatgtgcacgtgaatgtaggtggtaggtcttctgtgcctggcaaaatgaaggggcgcaaggcgaggtggtcagtgcgacccagtgacatggctaaaaaaaccttcaaccccattagggcgatcgtggacaacatgaaggtgaaacctaaccctaataagaccatgatttcactgtccatcggcgatcctaccgtattcggcaatctcccaactgacccagaagtgacccaggcaatgaaagatgccttggactctggcaagtacaatgggtacgctcctagcatcggcttcctgtcctcaagggaggagattgcttcttattatcactgccctgaggccccccttgaagctaaggatgttattctcacgagtgggtgctctcaagccattgacctctgcctcgctgtgctggcgaaccccgggcagaatatcttggtgcctaggcccggtttcagtttgtacaaaacactggcagagagcatgggcatagaggttaagctgtacaatctcctgcccgagaagtcctgggaaatcgatctgaagcagctggaatacctgattgatgagaagactgcctgcctgattgtgaataatccgtccaatccctgcgggtctgtattttcaaagagacacctccaaaagatcctcgccgttgccgctcggcagtgcgttcccattcttgctgatgagatctacggggacatggtgttcagcgattgcaaatacgaaccattggctacactttccaccgatgtgccaatcctgagctgcgggggtttggctaagcgatggctggtgcctgggtggaggcttgggtggatccttattcacgatcgcagggatatctttgggaacgagatcagggatggtcttgttaagctgagccaacgcatcctgggaccatgtacaattgtgcagggtgcacttaagagcatcctgtgcagaacccccggcgagttttatcacaataccctgtcttttctcaagtccaacgcagatctgtgctatggggcccttgccgctattcccggcctccggcctgtccggccatctggcgccatgtacctcatggttggtatcgaaatggagcacttccctgaatttgaaaacgatgtggaattcaccgagagactcgtggcagagcagtccgtgcactgcctgcccgccacatgttttgaataccccaacttcatcagagttgtgataactgttccagaagtgatgatgctggaagcctgctcacggatccaagaattctgtgaacagcattatcactgtgccgagggcagccaggaagagtgcgataag

SEQ ID NO: 20658 - DNA, 1362 bp, synthetic construct
  misc_feature 1..1362: note = source = /note="Description of Artificial Sequence: Synthetic coding sequence"
  source 1..1362: mol_type = other DNA
atggatccgtatatgatacaaatgtcatccaagggcaacctgccttctatcctggatgttcatgtcaacgtgggcggtaggagcagcgtgcctggcaaaatgaagggacgcaaggcccgctggtccgtgcgaccctcagacatggctaaaaagaccttcaatcctattcgggccatcgttgacaacatgaaggttaaaccaaaccccaataaaaccatgatttctttgtccataggcgaccccacagtgttcggtaatctgcccactgaccccgaagttacccaggccatgaaggatgccctcgactcagggaagtataacggatatgctccaagtatcggattcctgtcaagccgagaggagattgcatcttactatcattgccccgaggccccactggaagcaaaggatgttatcctcacaagtggatgttcacaggctatagatctgtgtcttgctgtcctggccaacccaggccagaatatactggtgcctagacccggcttttccctgtataaaaccctcgcagagtcaatgggtattgaggtgaagctttacaatctgctcccagagaagagctgggagatcgacttgaaacagctcgagtatcttatcgatgagaagaccgcttgccttattgtgaataatccgtcaaatccctgcggctcagttttttctaagcggcatttgcagaaaatcctggcagtcgctgccagacaatgtgtaccgatcctggcagacgaaatctacggagacatggtcttcagcgattgtaaatacgaacctctcgctacgctctccacagatgtgcctattctgagctgcggtggactggcgaagcgatggttggtcccggggtggcgcctggggtggatacttatccacgatcggagagacattttcggcaacgaaattagggacgggctggttaagctgagccagcggatcctgggaccatgcacaatcgttcagggcgcactcaaatcaatcctttgccgcacaccaggtgagttctatcataacacactctctttcctcaagtccaatgctgatctctgttacggggctctggcggctatacctggactgcgccccgtccgcccctcaggagcaatgtatctgatggtgggcattgagatggaacacttccctgagttcgaaaacgacgtggagtttaccgaacggctggtcgcagaacagagcgtacactgtctgccagccacttgcttcgagtaccctaattttattcgggtggtgattacagtgcccgaggtgatgatgctcgaggcatgcagtaggatccaggagttttgcgagcagcattatcattgtgctgagggctcccaggaggagtgtgataaa

SEQ ID NO: 20659 - DNA, 1362 bp, synthetic construct
  misc_feature 1..1362: note = source = /note="Description of Artificial Sequence: Synthetic coding sequence"
  source 1..1362: mol_type = other DNA
atggacccttacatgatccagatgtcgtcaaaggggaacctcccctccatcctggacgtccatgtcaacgtgggcggacggtcctccgtgccaggaaagatgaaaggcaggaaggcgcggtggagcgtgcggccctcggacatggcgaagaaaaccttcaatccaatccgcgccattgtggataacatgaaggtcaaacccaacccaaataagaccatgatttccctgtcaatcggagatcccactgtctttgggaacctgccgaccgatcccgaggtgacccaggcaatgaaggatgccctggattccggcaagtacaacgggtacgcaccatccatcggattcctctcgtcgcgggaggaaattgcatcatactaccactgtccggaagcgccgctggaagccaaggatgtcatcctgacctctggctgctcgcaggccattgacctgtgtctcgcagtgttggcaaacccgggacagaacatcctcgtgccgcgcccgggattttcgctgtacaagaccctggccgagtcgatgggaattgaagtgaagttgtacaacctgttgccggaaaaatcttgggagatcgatctgaaacagctggaataccttatcgacgaaaagaccgcctgtctgattgtgaataacccttctaacccttgcggaagcgtgttttcaaagagacacctgcaaaagatcttggcggtggcggcacgccagtgtgtgccgatcctcgcggatgaaatctacggcgatatggtgtttagcgattgtaaatacgaaccactggccactctgtcaactgacgtcccaatcctgtcatgcggaggcttggctaaaaggtggctggtgccgggctggcgtctgggatggatcctcatccatgacaggcgcgacatcttcggtaacgaaatccgggacggactggtcaagctctcgcagagaatcctcggtccgtgcaccatcgtgcaaggagccctcaagtcgattctctgccggaccccgggcgaattctaccataacactctgtcattcttgaagagcaacgcagatctctgctacggggcgcttgccgctatcccaggactccgcccagtcaggccgtcaggcgctatgtacctgatggtgggcatcgagatggagcactttccggagtttgagaatgacgtcgagttcaccgagcgcctggtggcggagcagtcggtccattgcctgccggccacctgcttcgaatacccgaatttcattagggtggtgatcaccgtcccagaagtcatgatgctggaggcgtgttcgcggatccaggaattctgtgaacagcattaccactgcgctgaaggtagccaagaggaatgcgacaag

SEQ ID NO: 20660 - DNA, 1362 bp, synthetic construct
  misc_feature 1..1362: note = source = /note="Description of Artificial Sequence: Synthetic coding sequence"
  source 1..1362: mol_type = other DNA
atggatccttacatgattcaaatgtcgtcaaagggcaacttgccatccattctcgacgtgcatgtcaatgtcggaggacggtcgtcggtgcctggcaaaatgaaaggacgcaaagccagatggagcgtgaggccatcggatatggcgaaaaagacttttaaccccatccgcgcaatcgtggataacatgaaggttaagcccaatccgaataagactatgatctccctttcaattggagatcccacggtctttggtaacctcccaaccgaccctgaggtcactcaagcaatgaaggatgccctggattcaggaaagtacaatggctacgccccctcaattggctttctgtcctcgagggaggaaatcgcatcctactaccactgtccagaagctcctctggaagccaaggatgtcattcttacttccggctgctctcaggcgattgacttgtgccttgctgtgctggcaaacccaggccagaatatactggtccctagaccaggcttttccctctacaaaactctggcagaatctatgggaattgaggtgaaactttacaacctcttgcctgaaaagtcatgggagatcgatcttaagcaacttgagtaccttatcgatgagaaaactgcatgtttgatagttaacaaccccagcaatccttgcggtagcgtgttctccaagagacatctgcaaaagattcttgccgtggccgcacggcagtgtgtgccaatcttggctgacgaaatctacggagatatggtctttagcgattgcaagtacgaaccacttgcaacgctgtcaaccgatgtgcccatcctctcctgtggtggtctggcaaagcgttggctggtgcctggatggcgacttggctggattcttatccatgacaggagggacatattcgggaacgagattagagatgggctcgttaagctctcgcaacggattctggggccctgtacgattgtgcagggggcccttaagtccattctgtgtcggacccctggagaattctaccataacacgctcagcttcctcaagtcgaatgccgatctgtgttacggtgcacttgccgcgattccaggacttcgtcccgtgcgccctagcggtgcaatgtatttgatggtgggaattgaaatggaacacttcccagaatttgaaaacgatgtggaattcacggaacgcctggtcgccgagcaatcagtgcattgtctcccggccacttgtttcgaataccccaactttatccgagtggtgattaccgtccctgaagtcatgatgctcgaggcctgttccagaatacaggaattttgcgaacaacattaccattgcgcagagggatcacaggaagaatgcgacaag

SEQ ID NO: 20661 - DNA, 1362 bp, synthetic construct
  misc_feature 1..1362: note = source = /note="Description of Artificial Sequence: Synthetic coding sequence"
  source 1..1362: mol_type = other DNA
atggacccttatatgatacagatgtctagcaaaggaaacctaccgagtatcttagatgttcatgtcaatgtgggagggcgcagtagcgtccccggaaagatgaagggccgtaaggctaggtggagcgtgaggccctcagatatggcgaagaaaacgtttaatcccatcagggcaatcgtcgacaatatgaaagtgaagcctaaccccaacaaaaccatgatctctctctccatcggagatcctaccgtgtttggtaacctgcctacggaccctgaggtgacccaagccatgaaggacgccctggactccggcaagtataatggctatgccccctctattgggttcttgtcctcccgcgaagagatcgccagctattaccattgtcccgaggctcctctggaagccaaggacgttattctgacatcgggttgcagccaggccatcgacctgtgcttagcagtgctagccaaccccggccagaatattttggttccccgaccaggattcagcctgtataagacacttgcggagagcatgggtatagaggtgaaactgtacaacctgctgcctgagaaatcatgggagatcgacctgaagcagctggaatacctcatcgacgagaagacagcctgtcttatcgtgaacaatcccagtaacccctgtgggagcgtgttttccaagcgacacctgcaaaagatcctcgcggtggcagccaggcagtgtgtgcccatcctggctgacgaaatctacggggacatggtgttctctgactgtaagtacgagcccctcgcaacactgagcaccgatgtgcccatcctttcatgtggaggcttggctaaaaggtggctggtaccgggatggagactgggctggattctaatccatgacaggagggatatattcggaaatgagatacgcgacggcctagtcaaactgtctcagcggatactcggtccctgtactatcgttcagggggcactcaagagtatcctgtgtaggactcctggcgagttttaccacaatacactgagtttcctgaagtccaacgccgacctctgttacggtgcacttgccgccatccccggcctgaggccagtgaggccaagcggtgcaatgtacttgatggtggggattgaaatggaacattttcccgagtttgaaaatgacgttgagttcactgagcggttggtggcggagcaatcagtgcactgcttgccggccacatgttttgaatacccgaattttatccgcgtcgttatcacagtccccgaagtaatgatgctcgaggcctgttctcggattcaggagttctgcgagcagcactatcactgtgccgaaggaagccaggaagaatgtgataaa

SEQ ID NO: 20662 - DNA, 1362 bp, synthetic construct
  misc_feature 1..1362: note = source = /note="Description of Artificial Sequence: Synthetic coding sequence"
  source 1..1362: mol_type = other DNA
atggacccttacatgatccaaatgtctagcaagggcaatctcccctctatcttggacgtccatgttaacgtgggcggcaggagttccgtgccaggtaagatgaaggggcgcaaggcccggtggtccgttcgaccaagtgacatggccaagaagacctttaatcccataagggcaattgtggataacatgaaggtgaaacccaatcccaacaaaactatgatcagtctgtccatcggagatcctactgtgttcggtaatcttccaaccgacccggaggtgactcaggccatgaaagacgcgttggactccgggaagtacaacggctatgcaccatcaatcggcttcctgagctctagagaagagattgcatcatattatcactgcccagaggccccattggaggccaaggacgtaatcctgaccagcggctgctcccaggcaattgacctctgtctggcagtcctggcgaaccccggtcagaatatcctagtgccccgtcctgggttttctctgtataagacattggccgagagtatgggtatcgaggttaagctgtacaaccttctgcccgagaagtcttgggaaatcgatcttaagcagctggagtacctgattgacgaaaaaactgcttgtctgattgtcaataatcccagtaacccatgcggtagtgtcttcagtaagcgccacctgcagaaaatcctcgcagttgccgcccggcagtgcgtgccgattctggcggatgagatatacggcgacatggtgttttctgattgtaaatacgagccgctggcgacgctgtcaaccgacgttcctatcctgtcctgtggcggccttgccaagcgttggttggtcccaggatggagactcggatggatactcatacacgaccgccgtgatattttcggaaacgaaatccgggatggcctcgtgaaactgagccagaggatcttagggccctgtaccatcgtacaaggcgccctgaagtctattctctgccgcactcccggagagttttatcacaatactctctctttcctcaaaagtaacgccgatctgtgctatggagcgttggctgctattcccgggcttaggcccgtgcggccatcaggcgcgatgtacttgatggtcggcattgagatggagcattttcctgaattcgaaaatgacgttgagttcaccgaaagactcgtggccgagcagtccgtacactgtctcccagccacctgtttcgagtatcccaacttcatccgtgtggtgataacagtccctgaggtgatgatgctggaggcttgctctcgcatccaagagttttgtgaacagcactaccactgcgcagagggttcacaggaggagtgcgataaa

SEQ ID NO: 20663 - DNA, 1362 bp, synthetic construct
  misc_feature 1..1362: note = source = /note="Description of Artificial Sequence: Synthetic coding sequence"
  source 1..1362: mol_type = other DNA
atggatccatatatgatccagatgtcttccaaggggaatctgccttccatactggacgtgcatgttaatgtgggtggtagaagttctgtccccggtaagatgaaaggcaggaaggccagatggtctgtaaggccgtctgacatggccaagaagactttcaacccgatacgcgccatagtggataacatgaaagtgaagccaaaccccaataagacaatgatttctttgtcaataggcgacccaacagtgttcggcaatctccctacagatcctgaggtcacgcaggctatgaaggatgccctcgattcaggcaaatataacggatacgctccgagcatcggatttctgagcagccgagaggagattgcttcctactaccactgccccgaggcacccctggaagcaaaagacgtaatcctcacctctgggtgcagccaagccatcgacctttgtctggccgtactggccaatccaggacagaacatcctggtgccccgcccaggattttctctctataagactctggcagaaagcatgggcatagaggtgaaattgtacaacctgttgcccgaaaaatcatgggaaatcgacctgaagcagctggagtacctgattgacgagaaaaccgcgtgcctcattgtgaataatcctagcaacccctgcggctcagtgttcagcaagcgccacttgcaaaagatacttgccgtggccgcccgccagtgtgtcccaattctggcggatgagatctatggagacatggtgttctcagactgcaaatacgagccgctggcaactctgtccactgacgtgcccatactgagctgcggcgggctcgccaagcgatggctcgtccccggttggagactgggctggattctcattcacgatcggagggatatcttcggaaacgagatccgggatggtctggttaagctttcacaaaggattctggggccctgcaccatcgtgcagggcgctctcaaatcaatcctgtgtcgcaccccgggagaattctaccacaacacactgtcatttcttaaaagcaatgctgatctgtgctacggagcgctggctgcaatccctggattgcggcccgtcagaccctcaggagccatgtatcttatggtcggcatcgagatggaacacttcccggagttcgaaaacgacgttgagtttactgagcgactcgttgccgagcaatctgtccactgcctccccgcgacatgcttcgaatacccaaatttcatccgagttgtgatcaccgtgcctgaggtgatgatgctcgaggcgtgcagcaggatacaggagttttgcgaacagcactaccactgtgcagagggcagtcaggaggagtgtgacaag

SEQ ID NO: 20664 - DNA, 1362 bp, synthetic construct
  misc_feature 1..1362: note = source = /note="Description of Artificial Sequence: Synthetic coding sequence"
  source 1..1362: mol_type = other DNA
atggacccatacatgattcaaatgtcctccaagggcaacctacctagcatacttgacgtacacgttaatgtaggaggtagatctagcgtccccggcaaaatgaaggggcgtaaagcgcgctggtctgtgaggccttctgatatggccaagaagacatttaacccgatccgagctattgtagataacatgaaagtgaagccgaatcctaacaaaactatgatcagtttaagcataggagatcctaccgttttcgggaacctgccgaccgaccctgaagtaacacaagccatgaaagatgccctcgatagcgggaagtacaatggttatgcccccagtatcgggtttctgtcatctagagaagagatcgcctcgtattaccactgtccagaggctcctctcgaagccaaggacgtgatcttgactagcggctgttctcaggcaatcgacctgtgcctggccgtgctggcgaatccgggccagaacattttagttcctcgtcccggcttctcgctgtacaaaaccctggcagaatctatgggcattgaggttaagctatacaatttactgccggaaaagtcatgggaaatcgacctgaagcaacttgagtaccttatcgacgaaaagactgcatgcctgatcgtgaacaaccccagtaatccctgcggctctgtgttctctaaaagacatttacaaaaaatcttggccgttgccgctcgtcaatgtgtgccaattctggctgacgaaatctacggtgatatggtgttctccgattgcaagtacgagccactggccaccttgtccactgacgttcctatcttatcctgcggcgggctggccaagcgctggctcgtcccagggtggaggctcggatggatcctgatacacgaccggagggacatcttcggcaatgagatccgcgacggcttggtaaaactgtctcagaggatcctcggcccctgtaccatcgtccaaggtgctctgaagtcaattctgtgtcgaacccctggggagttctatcacaatactcttagctttctaaagtccaatgcagacctgtgttacggagctctggccgccatcccagggctacgacccgtgaggccttctggcgcaatgtatttgatggtcggtatagaaatggagcacttccctgagttcgagaacgatgtggagtttacagagcgcctagtagctgagcagtcagtgcactgcttacctgctacctgcttcgaatacccgaattttatccgggtggtcatcacagttccagaagttatgatgctcgaggcctgtagccgcattcaggagttttgtgagcagcattatcattgtgccgaagggagccaggaggagtgtgataaa

SEQ ID NO: 20665 - DNA, 1362 bp, synthetic construct
  misc_feature 1..1362: note = source = /note="Description of Artificial Sequence: Synthetic coding sequence"
  source 1..1362: mol_type = other DNA
atggatccctacatgattcagatgtcctccaaaggaaatttaccctccatactcgacgtccacgtgaatgtggggggtcggagctccgtgccagggaaaatgaaggggaggaaagcccgttggagcgtgaggccatctgacatggcgaagaagacttttaatcctattcgagcaatcgtggataacatgaaggtgaaaccaaaccctaataagacgatgatttctctttctatcggggacccgaccgtctttgggaacctgcctaccgatcccgaggttactcaggctatgaaggacgctttagactctggcaaatacaatggctacgcaccaagtatagggtttctctcctctagagaggagatcgccagctattatcattgtccagaagcacccctggaggcaaaggacgtaattctgacatcaggctgtagtcaggcaatagatctatgtctggcagtgcttgccaacccaggccagaatatcctggtgcctaggcctgggtttagcctctacaagaccctggccgagtccatgggaatagaagttaagctgtacaatctgctccctgagaaatcctgggagattgatttgaagcagctcgaatacttgatcgatgaaaagaccgcgtgcctcattgtgaacaacccatcaaacccttgcgggagtgtcttttctaagagacacttacaaaagatactggcggtggcggcacgacaatgtgttcccatcctggcagatgagatctacggcgatatggtcttttcagactgcaagtatgaacctctggctactctgtcaaccgacgttccaattctctcttgcgggggcctcgcaaaaagatggctggtgccaggttggagactcggctggattttgattcacgacagaagagacatcttcggaaatgaaataagggacggactcgtaaaattgtcccagcgtattctgggtccctgtacaatagtgcagggcgctttgaagtccatcctgtgtagaaccccaggggagttctaccataataccctgtccttcctgaaatcaaacgctgacctatgttacggggcactggcggcaatcccaggtctgcgccccgtccgacctagtggggcgatgtatctgatggtgggaattgaaatggagcacttcccggaattcgaaaacgatgtggaatttaccgagaggctggtcgccgagcagagcgttcattgtttacctgcaacttgtttcgagtatccgaactttattcgagtggtcatcaccgtacccgaggtcatgatgttggaagcttgctccaggattcaggagttttgcgaacagcactatcattgcgccgaagggtctcaggaagaatgtgataag

SEQ ID NO: 20666 - DNA, 1362 bp, synthetic construct
  misc_feature 1..1362: note = source = /note="Description of Artificial Sequence: Synthetic coding sequence"
  source 1..1362: mol_type = other DNA
atggatccttacatgatccagatgtcctccaagggtaatttgccgtcaatactcgacgtgcatgtgaatgtggggggtcggagttctgtgccaggaaagatgaagggaagaaaagctcgatggtcggtcagacctagcgatatggccaaaaagactttcaacccgatccgcgcgatcgtcgataacatgaaggtgaagcccaatccaaacaaaaccatgatttccctctcgatcggggaccccaccgtgttcggtaaccttccgactgatcctgaggtcactcaggcgatgaaggacgccctcgactcagggaagtacaacgggtacgccccgtcgatcggcttcttgagctcacgggaagaaattgcgtcctactatcactgcccagaggctccgctcgaagcgaaggatgtcatcctgacctccgggtgctctcaggctatcgatctgtgcctcgccgttctggccaatccaggacagaacatcctggtgccacggccgggattctctctgtacaaaactcttgcggaatcaatgggaatcgaggtcaagctctacaacctgctcccggaaaaaagctgggaaattgatctgaagcaactggaatacttgatcgatgagaaaaccgcctgcttgatcgtcaacaatccgtcgaatccgtgcggaagcgttttctcgaagcgccacctccagaagatcctcgctgtggctgcccgccaatgcgtgcctatcctggcggacgagatctacggagatatggtgttttccgactgcaagtatgagccactggccactctttccactgacgtgcccattctttcgtgcgggggtttggcaaagcggtggttggtgcccggatggcgccttggttggatcctgattcacgatcgccgggacatttttggtaacgaaatcagagatggactggtgaaactctcgcagcgcatcctcggaccatgtaccatcgtccaaggcgcgctcaaatctatcctctgtcggactcctggagagttctaccataataccctgtccttcctgaagtcgaacgccgacctgtgctacggcgccctcgccgcgatcccgggtttgcgcccagtgcgcccgagcggcgccatgtacctcatggttgggatcgagatggaacacttcccggagttcgagaacgacgtcgagtttactgagcggctcgtggccgagcaatccgtccactgcctgccggcaacttgtttcgagtaccctaactttatccgcgtggtcatcacggtgcccgaggttatgatgctcgaggcgtgctcgcggatccaggaattctgcgaacagcactaccattgtgctgagggatcccaggaagagtgcgacaag

SEQ ID NO: 20667 - DNA, 1362 bp, synthetic construct
  misc_feature 1..1362: note = source = /note="Description of Artificial Sequence: Synthetic coding sequence"
  source 1..1362: mol_type = other DNA
atggatccatacatgatccagatgagcagtaaaggcaacctcccctcgattctggacgtgcacgtgaacgtgggcggacgcagttccgtcccaggtaaaatgaaggggcggaaggctaggtggagtgttcgcccatccgacatggcgaaaaaaacgtttaatcctatccgggccatcgtggataatatgaaagtcaagcccaacccaaacaagaccatgattagccttagcattggtgacccaacggttttcggcaatcttcccacagatccagaagtgactcaggccatgaaagatgctctggacagcggcaagtataatggatatgcaccctccattggattcctatcatcgcgcgaggagattgcttcatactatcattgccccgaggctccactggaggctaaagatgtcatcctgacatcaggatgttcccaggccatcgatctgtgtctagccgtcttagcaaaccccggtcaaaacatccttgttccccgacccgggttttctctgtataaaacacttgccgagtcaatgggcatcgaagtcaagctctacaatttactacctgagaagtcctgggaaattgacctgaagcagctcgagtacctgatcgatgagaagacagcctgtctgattgtgaataacccttctaatccctgcggtagcgtattcagtaaacgacatctgcagaagattttggcggtcgctgcacggcagtgcgtcccaatcctggccgacgagatttatggtgatatggtgttttctgactgtaagtacgagccactggctaccctctctacagacgttcccattttgtcctgcggaggcctcgccaagagatggcttgtacccggatggaggctcggctggatcctgatccacgacagacgagatatattcggaaatgaaattagagacggtctggtcaagctgtctcagcgaatcctagggccctgcaccatcgtgcagggggcattgaagtcaatcttatgtaggacacctggagagttctaccacaacacactttcatttctgaaatctaatgctgatttgtgctacggagcccttgcagcgattcctggactaaggccagtaagaccgagcggcgctatgtatctaatggtgggcatcgaaatggaacactttccagagttcgagaacgacgtggagttcaccgagcgtctagtggcagaacagtcggtgcactgcctgccggctacgtgcttcgagtacccaaactttataagagttgtgattacggttcccgaagtgatgatgcttgaggcctgtagccgcattcaggaattttgtgagcagcattatcactgcgccgagggctcacaagaggaatgtgataaa

SEQ ID NO: 20668 - DNA, 1362 bp, synthetic construct
  misc_feature 1..1362: note = source = /note="Description of Artificial Sequence: Synthetic coding sequence"
  source 1..1362: mol_type = other DNA
atggatccgtacatgatacaaatgtcctcgaagggcaatttgccatcaattctggatgtccatgtcaacgtcggaggacgttcatcagtgccggggaaaatgaaaggtagaaaggccagatggagcgtgcggccttcggatatggcgaagaaaacttttaacccaatccgcgcaatagtagacaatatgaaggtcaagccaaaccccaacaaaaccatgatatccctctcaatcggtgatcctaccgtgttcggtaacctgcctaccgacccagaagtgacccaggccatgaaggatgcactggattccggtaagtacaacggttacgccccctcaatcggatttctgtcatcgagggaggaaattgcatcctactaccattgcccagaggcacctcttgaggccaaggatgtcattctcacctcagggtgttcacaagctattgacctgtgtcttgccgtcctcgcaaatcctggacagaatattcttgtgcctagacctggattttcgctctacaaaaccctcgccgagtcaatggggattgaagtgaagctgtacaatctcctgcctgaaaagagctgggaaatagatttgaagcaactggagtacctcattgacgagaaaaccgcgtgtctgattgtcaataacccatccaatccttgtgggtcggtgttttcgaagcgccatcttcaaaagattcttgccgtggcggcgaggcagtgcgtccctatcctcgcagatgagatttatggggacatggtgttcagcgattgcaagtatgagccccttgcaacgctctcaacggacgtgccaatcctctcatgcggaggacttgcaaaacgttggctggtgcccggatggcgtcttggttggatcctcatccacgacaggcgcgacattttcgggaacgaaatcagagacggacttgtcaagctcagccaacggattctcggcccatgtactatcgtgcaaggagcactgaaatccatcctctgtaggaccccaggtgaattctaccacaacactctttcgttcctcaagtcgaacgcagatctttgttacggagcactggcggccattcctggactgcgccctgtgcgcccatcgggagcaatgtaccttatggtcggcattgaaatggaacacttcccagaatttgagaatgatgtggaattcactgaacgcctcgtggcggaacaatccgtgcattgtctgccagccacctgttttgagtacccaaactttattcgggtggttattaccgtccccgaagtgatgatgcttgaagcatgttcccggatccaggagttctgtgaacaacactaccattgcgccgagggctcccaagaggaatgtgataag

SEQ ID NO: 20669 - DNA, 1362 bp, synthetic construct
  misc_feature 1..1362: note = source = /note="Description of Artificial Sequence: Synthetic coding sequence"
  source 1..1362: mol_type = other DNA
atggatccgtacatgattcagatgagttccaagggaaatttaccctccattctcgatgttcatgttaatgtcggcggacggagctctgtccccggaaaaatgaaagggcgtaaggcgcggtggtctgttcggcctagcgatatggcgaaaaagacatttaatcctatcagagcgattgtggacaatatgaaagttaaaccgaatccaaataagactatgatatccctctcaattggcgatccaacggtatttggcaaccttccaacagatccggaagttacccaggcgatgaaagatgcactcgattctggaaaatataatggatacgcgcctagcatcggatttttgtcctcacgagaagaaatagcgtcgtactaccactgccctgaagcaccgctagaggcaaaagacgtaattttgacatcaggatgcagccaagcgattgatctttgtttggccgtgttggccaatccaggtcaaaatatccttgtgccgcggccgggtttctctctctataaaacgcttgcggagagcatgggaatcgaggttaagttatacaatttgctcccggaaaaaagctgggaaatcgacctcaaacaactcgaatatttgatagatgagaaaacggcatgtttgattgtaaataatccgagtaatccgtgcggaagtgtgttctctaaaaggcatctgcaaaaaattcttgcagtcgcagcgagacaatgcgtgccgattttagctgacgagatctatggggacatggtgttttcagattgcaaatacgaaccgttagccacactgtctacggacgtccctatattgagctgtggcggcctagcgaaacgctggttagtgccgggctggagacttggatggatactcattcatgatcgcagagatatttttggtaatgaaatacgcgatggtctggtcaagttgtcccaaagaatccttggaccgtgcactattgtccaaggagcactcaaatctattttatgccgcactcctggcgaattttaccataatacattgtcttttctaaagtctaatgctgatctgtgctacggcgcgcttgcagccatcccggggctgagaccggtccgcccttctggcgcaatgtatctgatggtagggattgaaatggaacactttccagagttcgaaaatgacgtggaatttaccgagcggttagtagcagagcagtcggtgcattgtcttcctgcaacctgtttcgagtaccccaattttattagggtcgttattacagtaccggaggtcatgatgttggaagcttgctcccgcattcaagaattttgcgaacagcactatcattgtgcggaagggagtcaagaagaatgtgataaa

SEQ ID NO: 20670 - DNA, 1362 bp, synthetic construct
  misc_feature 1..1362: note = source = /note="Description of Artificial Sequence: Synthetic coding sequence"
  source 1..1362: mol_type = other DNA
atggatccctacatgattcagatgagtagcaagggcaatttaccttcaatcctagatgtccacgttaatgtgggaggtagatcatccgtgccaggaaagatgaaaggccgcaaggcccgctggtctgtgcgcccgtccgatatggccaagaagacctttaacccaatccgcgccatcgtggacaatatgaaggttaagccaaacccaaataaaacaatgatttcgctatctattggcgatcctacagtgttcggaaacctgccaaccgatcctgaggtgacccaggccatgaaagatgcgctcgactctggaaaatacaacggatacgctccctccatcggcttcctgtccagccgggaggaaatcgcctcttattatcactgcccagaggccccgcttgaagctaaagatgtcatactaacttcaggctgttcacaggccatcgacttgtgtctggctgttctggcaaacccagggcagaatattctcgttcccaggcccggattttctttatataagacccttgccgagtccatgggtattgaggtgaaactttacaatttgctgcctgagaaatcgtgggagattgatctgaaacagctggagtatttaatagacgaaaagactgcctgtctgatagtcaataatccctctaacccctgtggctccgttttcagcaaacgacatctgcagaaaattctggcggttgcagcgcgacaatgtgtgcccattctcgccgacgaaatatacggtgacatggtcttttcggactgcaagtacgaacccctggctactctctccaccgatgtccccattcttagttgtgggggtctggccaaacggtggctggtgcccggctggcggttgggatggatattgattcacgatcgaagggacatctttgggaacgagatacgggacggactcgtgaaactgagtcaacggatactgggaccctgcacgatcgtgcaaggcgcccttaagtcaatactttgtaggacccctggagagttctaccacaacacattgtccttcctcaagtcaaacgcggacctatgttatggcgcccttgccgcaattcccggcctgcggcctgtgcggccctccggggctatgtatctaatggtgggcattgagatggagcatttcccggagttcgagaacgacgtggagttcaccgaacgtttagtggctgagcaatccgttcattgtcttcctgctacctgtttcgagtatcctaactttattcgggttgtgattacagtgcccgaggtcatgatgctcgaggcttgttcacgtatacaggagttttgcgagcagcattatcattgcgcagaggggtctcaggaggagtgtgacaag

SEQ ID NO: 20671 - DNA, 1362 bp, synthetic construct
  misc_feature 1..1362: note = source = /note="Description of Artificial Sequence: Synthetic coding sequence"
  source 1..1362: mol_type = other DNA
atggatccatacatgatccaaatgtcctcgaaaggcaacctgcctagcattctggatgtccacgtgaatgtgggtggtcggtcatccgtccctggaaagatgaagggacgcaaggcacggtggtccgtgaggccgtccgatatggcaaagaaaacgttcaacccgatccgcgctatcgtggacaacatgaaggtcaaaccgaaccccaataagaccatgatatctctcagcatcggcgaccctacggtatttggaaacctgccaactgaccccgaagtgacccaggcgatgaaggatgctctggattcaggaaagtacaacgggtacgcgccgagcatcggctttttgagctcgcgcgaggagatcgcctcctactaccattgcccggaagcacccctcgaagcgaaagacgtgatcctgacttcgggatgttcccaagccatcgacctttgtttggccgtgctcgcgaatcctggacagaatatcctggtgccaaggccagggttttcgttgtacaagacccttgcagagtcaatgggaatcgaggtcaagctctacaacctcctgccggagaaatcgtgggaaatcgatctgaagcagctggagtacctgatcgacgaaaagaccgcctgccttatagtgaacaatccgtcgaatccgtgcgggtccgttttctcaaaacggcacctgcaaaagatccttgccgtcgctgcacgccagtgcgttcctatcctggcggatgagatctacggggacatggtgttcagcgactgcaagtatgagccactggctactctgtcaacggacgtcccgatcttgtcctgcggtggcctggctaagagatggctggtgcctggatggcggctgggatggatcctgatccacgaccgccgggacatatttggtaacgaaatccgggacggactcgtgaagctcagccaaaggattctcgggccctgtaccatcgtgcagggggccctgaagtcgattctctgccgcaccccgggcgagttttaccacaacaccctttcattccttaaatccaatgccgatctgtgctacggtgcgctcgcggccattcccggcctgaggccggtccgaccatcaggagccatgtaccttatggtcggtattgaaatggagcatttcccggaattcgaaaacgacgtggaattcactgagaggcttgtggctgagcaaagcgtgcattgcctgccggcgacttgcttcgagtaccctaacttcattcgcgtggtgatcactgtcccggaagtgatgatgcttgaagcctgttcgcgcatacaggaattttgcgagcagcactatcattgcgcggaaggatcgcaggaggaatgtgataaa

SEQ ID NO: 20672 - DNA, 1362 bp, synthetic construct
  misc_feature 1..1362: note = source = /note="Description of Artificial Sequence: Synthetic coding sequence"
  source 1..1362: mol_type = other DNA
atggacccgtacatgatccaaatgtcgtcgaaaggaaatctcccatccatcttggacgtacatgtgaacgtcggcggtcggtcctccgtcccgggaaagatgaaaggacggaaggctcgttggtcggtccgcccgtcggatatggcgaaaaagactttcaatccaattcgggccatagtggataacatgaaagtgaaaccgaacccgaacaagaccatgatctccctctcgatcggggatcccaccgtctttggcaacttgccgaccgatcccgaggtcactcaggcgatgaaagacgcgctggattcgggtaagtataacggctacgccccttctatcggttttctgtcgtcccgggaggaaatcgcatcgtactaccattgcccggaggcaccactggaagcgaaggacgtcatactcacttctgggtgctcacaagccatcgatctgtgcttggccgtcctggctaatcctggacagaatatcctggtgcctagaccgggtttctcgctgtacaagactctggccgaatcaatggggatcgaagtcaagctgtacaacctgctcccggagaagtcgtgggagattgacctgaaacagctcgagtatctgatcgatgaaaaaactgcatgtctgatcgtgaacaacccgtccaacccatgtggctcggtgttcagcaagaggcacctccagaagatcctggctgtggcggcgaggcagtgcgtgcctatcctggccgacgaaatctacggtgacatggtgttctcggactgcaaatacgaaccgctggcgacgctgtccaccgatgtcccgatcctgagctgcggaggacttgccaagaggtggctcgtcccaggctggcggctggggtggatcctcatccacgaccgccgggacatctttggaaatgagatccgggatggcctggtgaagctgtcacagcgcattctgggaccatgcaccatcgtgcagggagccctgaagtcaatcctgtgtcggactccaggagagttctaccataatactctgtcatttttgaagtccaacgcggacctctgttacggagccctggctgctatccctgggcttcgcccggtccgcccctccggagccatgtacctgatggtgggaattgaaatggaacacttcccggaattcgaaaacgacgtcgaattcactgaacggctggtggccgagcagagtgtccattgcctccctgcaacttgtttcgagtacccgaatttcatcagggtggtgattactgtgcccgaggtgatgatgctggaagcatgctcccgtatccaggaattctgcgaacagcactaccactgcgcggagggcagccaagaggagtgcgataag

SEQ ID NO: 20673 - DNA, 1362 bp, synthetic construct
  misc_feature 1..1362: note = source = /note="Description of Artificial Sequence: Synthetic coding sequence"
  source 1..1362: mol_type = other DNA
atggacccatatatgatccaaatgagctcgaaagggaatctgccctcaattctggatgttcacgtgaatgtgggcggaaggagctcagtccctggcaagatgaaaggtcggaaggcacgctggtcagttagacctagcgatatggccaagaaaacctttaatcctatcagagcgatcgtggataacatgaaggtgaaaccgaacccaaataagactatgatctccctttcgattggtgatcctactgtctttggaaacctgccaaccgatccagaggtgactcaagcaatgaaggacgcacttgactccgggaaatacaacggctacgcccctagcataggatttcttagcagcagagaagagatcgcatcctactaccattgtcctgaggcaccactcgaagcgaaggatgtcattctcacgtctggatgctcccaggccatcgacctttgtctcgcagtcctcgcaaatccgggacaaaacattctcgtgccgcggcccggatttagcctctacaagactctcgcagagtccatgggaattgaagtgaaactgtacaaccttctgccagaaaagagctgggaaattgatttgaagcaattggaatacctgattgatgaaaagaccgcatgcctcattgtgaacaacccttcaaacccatgcggctcagtgttttcgaaacgccatcttcagaaaatactcgcagttgccgctcgacaatgcgtgcctatcctggcagatgagatttacggcgatatggttttctcggactgcaagtacgaacctcttgccaccctttcgactgatgtgccaattctgagctgcgggggccttgcgaagcgctggctggtgccaggatggcgactcggttggatcctgattcatgaccgtcgcgacatttttggtaatgaaatcagagatggcctggtgaagctgtcacaacggattctcggcccctgcacgattgtgcagggagctctgaagtcaattctgtgtagaactcccggagaattctaccataacactctgtcgtttctgaaatccaacgcagacctgtgctacggagcgcttgccgcaataccagggctgcgcccggtccgcccttcgggcgccatgtacctcatggtgggcattgagatggagcacttcccggaattcgaaaatgacgtggagtttactgagagacttgtggccgaacaaagcgtgcactgcctccccgcaacctgtttcgagtacccaaactttatccgcgtagtgattactgtgccagaagtcatgatgcttgaagcatgtagccgaattcaagagttttgtgaacagcattaccattgtgccgaaggatcccaggaagagtgcgataaa

SEQ ID NO: 20674 - DNA, 1362 bp, synthetic construct
  misc_feature 1..1362: note = source = /note="Description of Artificial Sequence: Synthetic coding sequence"
  source 1..1362: mol_type = other DNA
atggacccctatatgatccaaatgtcatctaagggaaatcttccttcaatcctcgatgtgcatgtgaatgtcggagggcgtagctcagtgcccggtaagatgaagggccggaaggcccggtggtcggtaagaccgagcgatatggcaaagaaaactttcaacccaattcgcgccattgtggacaacatgaaagtgaaacctaatccaaacaagactatgattagcctgtcgatcggggatcccaccgtgtttggaaatcttcccactgacccagaagtgacgcaggcaatgaaggacgcactggactcgggaaagtataacggctacgcacccagcatcggtttcctttcgtcgcgcgaggagattgcaagttactaccattgtccagaagcgcctctggaagccaaggatgtcattctcacctccggatgttcgcaagcaatagatctgtgtttggccgtgctggctaaccccggccagaatatacttgtccctaggcctgggtttagcctgtacaaaaccctggccgagtccatgggaattgaagtgaaactttacaatcttctcccagagaaaagctgggagatcgacctcaagcagctggaataccttattgacgaaaaaacggcgtgcttgatagtcaataacccatccaatccttgtggaagcgtgttttcgaagcgccaccttcaaaagattctggcagttgcagctaggcaatgcgtgcccattctggcagatgaaatctacggggatatggtcttttcagactgtaaatacgaaccactggcaaccctttcgaccgatgtgccaattcttagctgtggtggactcgcaaagagatggttggtgcctggatggagactggggtggatccttattcatgatcggagagacattttcggaaacgaaattcgggatggtctggtaaaacttagccaacggatcctgggaccatgtaccatcgtgcaaggtgccctgaagtccatactgtgccgcactccgggggagttttaccataacactctctcatttctgaagtcgaatgcagacctttgctacggggctttggctgcaatccccggactgaggccggttagaccctcgggtgctatgtacctcatggtcgggattgagatggaacactttccagaattcgagaatgatgtggagtttaccgaacgactggtcgcagagcagtcagtgcattgtctgccagccacttgcttcgagtaccctaacttcattagggtggtgatcacggtgccagaggtgatgatgcttgaagcatgctcaagaatacaagaattttgtgaacagcactaccactgcgcggagggcagtcaggaagaatgtgataag

SEQ ID NO: 20675 - DNA, 1362 bp, synthetic construct
  misc_feature 1..1362: note = source = /note="Description of Artificial Sequence: Synthetic coding sequence"
  source 1..1362: mol_type = other DNA
atggacccttacatgatccagatgtcctccaagggaaatttgccctccattctggacgtgcatgtgaacgtcggaggccgaagtagtgtcccgggtaagatgaaaggtcgcaaagcgcgttggtctgtgcggccttccgatatggcgaagaaaacattcaatcccattcgcgccattgtagacaatatgaaggtaaagccaaaccccaacaagactatgatcagtttgtcaattggcgaccccaccgtgtttgggaatctgcctaccgatcccgaggtaacacaagccatgaaggacgctctggactcaggaaaatacaacggctacgccccatccattggatttctatcatcgcgagaagagatagcatcttattatcactgtcccgaggcccccctcgaggccaaagacgttatcctgaccagtggatgttctcaggccattgacctgtgtttggctgttttagccaatcccgggcagaacattctcgttccgaggcccggattcagcctgtataagacccttgccgagagcatggggattgaagttaaactctataacctcttgccggagaagtcttgggagattgatctgaagcagctggaatacctgatcgatgagaagaccgcctgcctcattgtgaacaatccaagtaatccttgtggaagcgtgttcagtaaacggcacttacagaaaatcttggcagtggcggctcgacaatgtgtgcccatccttgcagatgagatctacggggatatggtgtttagtgactgcaagtatgagccccttgccaccctatctacagatgttccgattttgtcatgtggagggctggctaagaggtggcttgttcccggttggaggctaggctggatcctaattcatgacagacgggatatctttgggaatgaaattcgagacgggcttgtcaaattatcacagcgtattctgggaccctgcaccattgtccagggggcactgaaaagcatactttgccggacccccggtgagttttaccacaatacgctctccttcctgaagtctaacgcagacctctgctacggcgccctggcggccatccccggcctgcggccagtgaggccatcgggcgctatgtacctcatggtggggatagaaatggagcattttcccgagtttgagaatgatgtggagtttaccgaacgcctggtggcagagcagagtgtgcactgtctgcctgccacctgctttgagtatcccaatttcatccgagtcgtcattaccgtcccagaggtgatgatgctggaggcatgctccaggattcaggagttttgtgagcagcactatcactgcgctgagggcagccaggaggagtgtgataag

SEQ ID NO: 20676 - DNA, 1362 bp, synthetic construct
  misc_feature 1..1362: note = source = /note="Description of Artificial Sequence: Synthetic coding sequence"
  source 1..1362: mol_type = other DNA
atggatccatacatgatacagatgtcttcaaagggaaatctgccctccatcctcgatgtccatgtcaacgtgggaggtaggagtagcgtcccaggtaagatgaagggcaggaaggcccgctggagtgtccgtcccagtgacatggccaagaaaacttttaatcctattagagccattgtagacaacatgaaagtgaagcctaacccaaataagaccatgatcagcctgtctatcggcgatccaacagtgtttggaaatttgcccacagatcctgaggttacacaggccatgaaagatgctcttgactcaggtaagtataatggatacgcccctagcattggatttctctcctctcgtgaagaaattgcatcctattatcattgtcccgaggctcccctggaggccaaagacgtcatcttgacttctggttgcagccaagcaatcgatctttgcctcgctgtcttggctaatcctggccaaaacatcctggtgcccaggcctggcttcagcctctacaagactctcgccgagtctatgggaatcgaggtaaaattgtacaatctgctgcctgagaagagttgggagatcgacctgaaacagctggaatacctgatcgatgagaaaaccgcatgcctgattgtgaacaatcccagtaatccatgtggctctgtattctcaaaacgccacctgcagaagattctggcagtcgctgcccgtcagtgtgtcccaatcctggccgacgagatatatggagatatggtgttctccgattgcaaatacgaaccactggctactctgtctactgacgtgcccatcttgagttgtggaggtctggctaagaggtggctggtcccaggttggcgtctcggctggatcctgattcacgaccgccgcgacatctttggcaacgaaattcgcgacggccttgtgaagctttctcaacgtatcctcggaccctgcaccattgttcagggagccctgaaaagcattctctgcaggacacctggtgaattctatcacaatactctttctttcctgaagtcaaatgctgatctgtgctatggcgctttggctgccattcccggacttcgccctgtaagaccctctggagctatgtacctgatggtcggtatagagatggagcatttccctgagttcgagaacgatgtggagtttaccgagcgcctggttgctgaacagagcgtgcattgtctgcccgcaacatgctttgagtaccccaacttcattcgcgttgtgatcactgttcccgaagttatgatgctggaagcatgttccaggattcaggaattttgcgaacagcactaccattgcgctgagggttctcaggaggagtgcgataaa

SEQ ID NO: 20677 - DNA, 1362 bp, synthetic construct
  misc_feature 1..1362: note = source = /note="Description of Artificial Sequence: Synthetic coding sequence"
  source 1..1362: mol_type = other DNA
atggatccgtacatgatccagatgtcatctaaggggaatttgccaagcatcctcgatgttcacgtcaacgtggggggccggtcgtcggtgcccgggaagatgaaaggccgcaaagcaagatggtcggtgcgcccttcggatatggctaagaaaactttcaatccaatcagagcgatcgtagacaacatgaaggtgaagccgaatccgaacaagacgatgattagcctctccatcggtgatcctaccgtttttggaaacctgcctaccgacccggaggtgactcaggcaatgaaggatgcactggactctggaaagtacaacggatacgccccttcgattggattcctgagctcgagagaggagatcgcttcgtactatcactgcccggaggctcccttggaagcaaaggacgtcattctgactagcggatgttcccaagctatcgacctctgcctggccgtgctcgcgaatcccggccaaaacatcctcgttccgcggcctggcttctcgctgtataagactctcgcggagtcaatgggaatcgaagtgaagctgtacaatctgctccctgaaaaaagctgggaaattgaccttaagcaactggagtacctgatcgatgagaaaaccgcgtgtctgatcgtgaataacccatcaaatccgtgcggatcggtgttttccaagcggcaccttcagaagatcctggcagtggccgcgcgtcagtgtgtgcccatcctggctgacgagatctacggagacatggtgttttcagactgcaagtacgaacccttggcgactctctccaccgacgtgccgatccttagctgcgggggactggctaaacgctggcttgtccctggttggagactgggatggatcctcatccacgaccgcagagacatctttggcaacgaaataagggatggcctggtgaaactgtcgcagcgcattctcggaccgtgtactattgttcagggagcgctcaaaagcattctttgccgaaccccaggagaattctaccacaacactctctccttcctgaagagcaacgcggatttgtgctacggagccctggccgctatcccggggctgaggccagtgcggccatctggcgctatgtacctgatggttggcattgaaatggaacacttcccggaattcgaaaacgatgtcgagttcacggagagactcgttgctgaacagtccgtccattgcctcccggccacctgcttcgaatacccaaacttcatccgagtcgtgatcaccgtcccggaagtgatgatgcttgaggcttgctccagaatacaggaattttgcgagcaacattaccattgtgctgagggatcccaagaagaatgcgataag

SEQ ID NO: 20678 - DNA, 1362 bp, synthetic construct
  misc_feature 1..1362: note = source = /note="Description of Artificial Sequence: Synthetic coding sequence"
  source 1..1362: mol_type = other DNA
atggatccatatatgattcaaatgtcaagtaaaggtaacttaccaagtattttagatgttcatgttaatgtaggaggaaggtcatctgtaccaggtaaaatgaagggaagaaaggccagatggtcagttagaccatcagatatggctaaaaaaacatttaatcctattagagctattgtagataatatgaaagttaaacctaatccaaataagactatgataagtttatctattggtgatccaacagtttttgggaatcttcctactgatccagaagtaacacaggctatgaaggatgcattagatagtggtaaatataatggttatgcaccatcaataggttttctaagttctagagaagaaattgcatcatattatcattgtccagaagctccacttgaagctaaagatgtaattttaacaagtggttgttctcaagctattgatttatgtttagctgttttagctaatcctggtcaaaatatattagttccaagaccagggttcagtttatataagacattagcagaatctatgggtattgaagttaaattatataaccttcttccagaaaagagttgggaaattgacttaaagcaattggaatatcttattgatgaaaagacagcatgtttaatagttaataatccatccaatccatgtgggtcagttttttctaaaagacatcttcaaaaaatattagctgttgctgctagacaatgtgttccaattttagcagatgaaatttacggagacatggttttttcagactgtaaatatgagccattggctactttgtcaactgacgttccaattctttcttgtggaggtttagctaaaagatggcttgtaccaggatggagacttggatggatattaattcatgatagaagagatatttttggaaatgaaattagagatggattagttaaattatcacaaagaatacttggaccatgtactattgttcaaggagctttaaaatcaatattatgtcgtactccaggagaattctatcataatactttatccttcttaaaatcaaatgcagatttatgttatggtgcacttgctgctattccaggattacgaccagttagaccatcaggagctatgtatcttatggttggtatagagatggaacacttccctgaatttgaaaatgatgttgaatttacagaaagacttgttgcagaacaatcagtacattgtttaccagcaacttgtttcgaatatcctaattttattcgtgttgttattactgttcctgaagttatgatgttagaagcttgttcacgtatacaagaattttgtgaacaacattatcattgtgcagaaggatctcaagaagaatgtgacaaa

SEQ ID NO: 20679 - DNA, 1362 bp, synthetic construct
  misc_feature 1..1362: note = source = /note="Description of Artificial Sequence: Synthetic coding sequence"
  source 1..1362: mol_type = other DNA
atggacccatacatgatccagatgtcctcaaaagggaatctgccctccatcctggatgtgcacgtgaacgtgggagggcgcagtagcgtgcccggcaagatgaagggacggaaggcccggtggagcgtaaggcccagcgacatggcaaagaagacatttaacccaatcagagccattgtggataatatgaaagtaaaaccaaaccccaacaaaactatgatttcactctctataggggaccccaccgtgtttggaaatctcccaacagatccagaagtgactcaagctatgaaggatgccttagattccggcaagtataacggttatgccccttcaattggcttcctcagcagtcgcgaagaaattgcctcatactatcactgtccagaagctccgctagaggcaaaagacgtgattctgacttcaggatgctcacaggcaatcgacctctgcctcgcggtcctcgccaatcccgggcagaatatcctagtacccagaccgggtttcagtctgtacaaaactctggcagaatccatgggaattgaagttaaactttataatctcttgcctgagaagagttgggagatagatctgaagcagctcgagtatctcattgacgagaaaaccgcatgtctgatagtcaacaatccctccaatccttgcggctcggtgttcagtaaacgccaccttcagaaaatactcgccgtcgcagcacggcagtgcgtgcctattcttgctgacgagatctatggggacatggtcttttcagattgtaagtacgaacccctggccaccctttctaccgacgtcccaatactgtcatgcggtggcctcgctaagcgctggcttgtccctggctggcgtctgggctggatactgattcacgatagacgggatatctttgggaatgagatccgggacgggctggtgaaactctcacaacgcattctgggcccttgtaccatagtgcagggcgctctcaagtctatcttgtgccgcacccctggcgagttctaccataatacactatcctttctcaagagcaacgccgatctctgctatggggcccttgcagcgattccagggctgagacctgtgcgaccgtctggcgccatgtacctcatggtgggcattgagatggagcacttcccggagttcgaaaatgatgtcgaattcacagagcgtcttgtagctgagcagtcggtccactgtctgccggcaacctgttttgagtatcccaatttcatacgcgtcgttatcactgtgccagaggtgatgatgctcgaggcatgcagtcgaattcaggaattctgcgagcagcattatcactgcgccgaaggaagtcaggaagagtgtgataaa

SEQ ID NO: 20680 - DNA, 1362 bp, synthetic construct
  misc_feature 1..1362: note = source = /note="Description of Artificial Sequence: Synthetic coding sequence"
  source 1..1362: mol_type = other DNA
atggatccgtacatgatccaaatgtcgtccaagggtaatctgccttctatcctcgacgtccacgtgaacgtgggaggacgctcctcagtgcctggaaaaatgaagggccggaaggcacgctggagcgtgcgcccttcggatatggcgaagaaaacctttaacccgatcagagccatcgtggataatatgaaggtcaagccaaaccccaacaagactatgatctcgctctccatcggagatccgaccgtgtttggaaatctgccaactgatccagaagttacccaagcaatgaaggacgcgcttgactcgggaaaatacaacggatacgctccatctatcggtttcctgtcatcgcgggaagaaatcgctagttactaccactgccctgaagctccccttgaagcgaaggacgtgatcctcacctcgggatgcagccaggccatcgacctgtgcctggcggtgttggcaaacccgggacagaacattctggtgccgcggccaggcttcagcctgtacaaaactttggccgagagcatggggatcgaggtcaaactgtacaaccttttgccggagaaatcctgggaaattgacctcaagcaactggagtatctcattgatgaaaagacggcgtgcctgattgtgaacaatccgagcaatccctgtggcagcgtgttcagcaagcggcacctgcagaaaatcctggccgtcgcggcccgccaatgcgtgccgatccttgccgatgagatctacggagacatggtgttctccgattgcaagtacgagcctctcgccactctgtcgaccgacgttccaattctgtcatgcggcgggctggctaagagatggttggtgccggggtggcgcctcggatggatcctgatccatgatcggagggacatcttcggaaacgagatccgagacggactggtgaagctctcccagagaatcctgggtccgtgtaccatcgtccagggagcactgaaatcgatcctctgccgcactcctggcgagttttaccacaataccttgtcgtttctgaagtcaaatgctgacctctgttatggcgccctcgcggccatccctgggctgcgtccggtacgcccgtcaggggcaatgtacctcatggtcggtatcgagatggagcatttccccgaattcgaaaacgacgtcgaattcaccgagagactggtcgccgaacaatcagtgcattgcctcccagccacttgtttcgagtacccaaacttcataagggtggtcattacggtgccggaagtgatgatgctggaggcatgctcccggatccaggaattctgcgaacagcattaccactgtgccgaaggctcccaggaagagtgcgacaag

SEQ ID NO: 20681 - DNA, 1362 bp, synthetic construct
  misc_feature 1..1362: note = source = /note="Description of Artificial Sequence: Synthetic coding sequence"
  source 1..1362: mol_type = other DNA
atggatccctacatgatccaaatgagcagcaaaggcaacctgccctcaattcttgacgtacacgtgaacgtgggcggacggtcatcagtcccagggaaaatgaagggaagaaaagctaggtggtctgtgagacctagtgacatggcaaaaaaaactttcaatcctatcagagctatagttgataatatgaaggtgaagccaaatccgaataagacaatgatcagtttgtcaataggcgaccccactgtcttcggaaatttgcccaccgaccccgaagtgacacaagccatgaaggacgcgttggacagcggtaaatacaatgggtacgcccccagcattgggtttttgtcatctagggaggaaatcgcgtcatattatcattgtccagaggctcccctggaggccaaagatgtgattctaacttcaggctgctcgcaggccatagatctgtgtctggctgtgcttgctaatcctggccagaacatcttggtgccccgacccggcttttcattgtataaaaccttagccgagtctatgggtattgaggtgaagctctacaatctactgccggagaaatcatgggaaattgatctgaagcaactggagtatctgattgacgagaagaccgcatgcctcatcgtaaataatccttccaacccgtgtggcagtgttttttctaaaagacaccttcagaaaatcctagctgtcgccgcccggcagtgtgtgccaattttggcggacgaaatctatggggatatggtgttctctgactgcaaatacgaaccgttggcaactctgtctaccgatgtgcccatattatcttgtggcggactggccaagagatggctggtcccgggctggagactaggttggattttgatccacgacaggagggacattttcggtaatgagattcgagacggactcgtaaaattatctcagagaatacttgggccatgtactattgttcagggtgccctaaaatcgattctgtgtcgtactccaggggaattttatcacaatactctgtcttttctgaagagcaacgctgatctttgctacggcgccttggccgccattcccggtctacgaccagtgcggccgtcaggtgcaatgtatctgatggtcgggatagagatggaacattttccagagttcgaaaacgacgtggagttcactgaaagactcgtagccgagcagtctgtgcattgtctccccgctacttgcttcgaataccccaattttattcgcgttgtgataacagtgcccgaggtgatgatgcttgaggcctgcagccgcatacaggagttctgcgagcagcattatcactgcgctgaggggagccaggaggaatgcgacaaa

SEQ ID NO: 20682 - DNA, 1362 bp, synthetic construct
  misc_feature 1..1362: note = source = /note="Description of Artificial Sequence: Synthetic coding sequence"
  source 1..1362: mol_type = other DNA
atggacccttacatgatacagatgagcagcaagggaaatctgcctagcatccttgacgtgcatgtcaacgtcggaggacgttcgagcgtgccaggaaaaatgaagggtcgcaaggccaggtggtccgtcagaccttcagacatggcaaagaaaaccttcaaccctatccgcgcgatcgtggacaacatgaaggtgaagcccaatccgaataagaccatgatcagcctgtccatcggcgacccgactgtgttcggcaacctgccgaccgacccggaagtgacccaagcaatgaaggatgccctggactctggcaagtataatggatacgcgccgagcatcggcttcctttcctcacgcgaggagattgcttcgtactaccactgcccagaagccccattggaagccaaggatgtgattctcacctccgggtgctcacaggccattgacttgtgcctggcggtcctcgccaacccaggacagaacatcctggttccgcggccggggtttagtctgtacaagaccctcgcggaatcgatgggaatcgaagtcaaactgtacaacctgctgcccgagaagtcctgggaaatcgatctgaagcagctggagtacctcatcgacgagaaaactgcatgcctcattgtcaataacccgtcgaacccatgcggatccgtgttctcaaagaggcatctccagaagatcctggccgtggcggcacggcaatgtgttccaatcctggctgacgaaatctatggagacatggtgttctctgattgcaaatacgaaccgctggcgactctgtcgactgatgtgcccatcctgtcgtgtggtgggctggccaaaagatggttggtgcccggctggagacttgggtggatactgattcacgacaggcgcgacatcttcggaaacgagatccgtgatggtcttgttaaacttagccaaagaatcttggggccgtgtactattgtgcagggtgcccttaagtctatcctctgccggactccgggggaattctaccacaatacgctgagcttccttaagtcaaatgcagatctgtgctacggagccctggcagcgattccgggactccggccagtaagaccgagcggagcgatgtacttgatggtgggtatcgaaatggagcattttcctgaatttgagaacgacgtcgagtttaccgaacggcttgtggctgagcaatccgtccactgcctgcccgctacgtgcttcgagtaccccaactttatcagagtcgtgatcaccgtgccagaggtaatgatgctggaagcctgctcgcgaatccaagaattctgcgaacagcactaccattgtgccgaaggcagtcaggaggagtgtgataag

SEQ ID NO: 20683 - DNA, 1362 bp, synthetic construct
  misc_feature 1..1362: note = source = /note="Description of Artificial Sequence: Synthetic coding sequence"
  source 1..1362: mol_type = other DNA
atggatccatacatgattcagatgtcctcaaagggaaacctgccttcaattctcgatgtccacgtgaatgtgggtggtagaagctccgtccctggaaaaatgaaaggacgcaaggctaggtggtccgttcgcccgtccgatatggcaaaaaagaccttcaaccccatcagagcgattgtggataacatgaaagtgaagcctaatcccaacaagaccatgatttccctttcaattggggatcctaccgtctttggtaacctccccactgacccagaagtcactcaggcgatgaaagacgcactggactcgggcaagtataatgggtacgcaccttcgattggatttctctcttcaagagaggagatcgcttcctactaccattgtcctgaagctcctctggaagcaaaggacgttattctcacttcaggatgttcccaagcaattgatctctgtttggccgtgctcgcaaacccaggtcaaaacattcttgtgcccagacccggcttttctctgtacaaaacgctcgcagaaagcatgggcatagaagtcaagctgtacaacctcttgccagagaaatcgtgggagatcgatctgaagcagctggaatacctgattgatgaaaagacggcatgtctgatcgtgaacaacccgtccaatccatgcggttcagtgtttagcaaaagacatctgcagaaaatccttgcggtggcggcccgtcagtgcgtccctattttggcggacgagatttacggagatatggtctttagcgattgcaaatacgagccccttgccactctgtcgactgatgtgccgattctgtcatgtggtggactggcaaagcgctggctggtgccagggtggcgccttggttggattcttattcatgaccggcgcgatatctttggaaacgaaatcagagatggtctggtgaaactttcccaacgcatcctgggaccatgtaccattgtgcaaggggcactgaagagcatcctgtgcagaactccaggcgaattctatcataacaccctgtcctttcttaagtccaatgctgacctttgttacggggcccttgcagcaatccctggcctgcgtcctgtgcggccatcaggtgcaatgtaccttatggtgggaatcgagatggaacatttccctgaattcgagaacgatgtcgaatttacggaacgtctggtggctgagcagtcggtgcactgccttcctgccacttgttttgaataccccaacttcataagggtcgtgatcactgtgcctgaggtgatgatgcttgaagcctgctcgcggatacaggaattttgtgaacaacactaccactgtgcagagggaagccaggaagagtgtgataag

SEQ ID NO: 20684 - DNA, 1362 bp, synthetic construct
  misc_feature 1..1362: note = source = /note="Description of Artificial Sequence: Synthetic coding sequence"
  source 1..1362: mol_type = other DNA
atggatccgtatatgatccagatgagcagcaagggaaatctgcccagtatcctggacgttcatgtcaatgtaggggggcgaagtagtgtgcccgggaaaatgaagggacgaaaagctcggtggtccgtacgaccgtccgacatggccaagaagacctttaacccgatcagagccattgtggataatatgaaagtcaagcctaaccctaataagacgatgatcagccttagcattggagatcccacagtgtttggaaatctgcccaccgatccagaagtgacccaggctatgaaggatgccctggacagcggaaaatacaatgggtacgctccatcaatcggctttctctcatcccgcgaggaaatagcttcttattaccactgtccagaggcacccctagaggccaaggacgtcatattgacctcaggatgttcccaggctatcgacctttgtctggccgtgctcgccaacccggggcaaaacatcctggtaccccgaccagggtttagcctgtacaagacactggccgagagcatggggatagaagttaagctctacaatctgctgccagagaaaagctgggagatcgacctcaagcagttggagtacctgattgatgagaagactgcctgcctcattgtcaacaacccttcaaacccatgcggaagtgtgttttcgaaacggcaccttcagaaaattttggccgtggcggcgcgtcaatgcgtgccaatcctagccgatgaaatctatggagatatggtgttttctgattgtaaatacgagcccttggctactctgtctacagatgtgcccattctcagctgcggcggactggcaaaacgctggctcgtgccgggctggcggcttggttggattttgatccatgaccgccgagacatttttggaaatgaaattcgggatggtttggtgaagttgtcccagcgaatcctgggcccatgcaccatcgtgcagggcgcgttgaagtccatattgtgcaggactccgggggagttttaccataacaccctgtcctttctaaagtcaaacgcggacctgtgttacggagccttagccgccatccccgggttgcgccccgtacggcctagcggtgctatgtatctgatggtcggaattgaaatggagcacttcccggagttcgagaatgacgtggagttcacagagaggttggttgctgagcagagtgtgcactgcctgcccgctacatgcttcgagtatccgaattttatccgcgtagtcatcaccgtgccagaggtgatgatgctggaggcttgcagtcgcatccaggagttctgcgagcaacactaccattgtgccgaaggctctcaagaggagtgcgacaag

SEQ ID NO: 20685 - DNA, 1362 bp, synthetic construct
  misc_feature 1..1362: note = source = /note="Description of Artificial Sequence: Synthetic coding sequence"
  source 1..1362: mol_type = other DNA
atggacccatatatgattcaaatgtcaagcaagggcaatctgccttccatcttggatgttcacgttaatgttgggggtcggagttccgtgcctggtaaaatgaagggaagaaaggccaggtggagcgtgagaccttcagatatggcaaaaaagaccttcaatcctattagggcaattgtggacaatatgaaggttaagccaaatcccaacaagaccatgatttccttgagcataggcgatcctactgtattcggcaacttgccaacagacccagaggttacgcaagcaatgaaggatgcactggattcaggtaagtacaacgggtacgctccatctattggatttttgtcctccagggaagaaatcgctagttactaccattgtcccgaggctcctctcgaggctaaagatgttattttgacatccgggtgttctcaggccatcgatctctgcctggctgttctggctaacccgggtcaaaacatcttggtccctagaccaggcttttcgctctataaaacgcttgcggagagtatgggaatcgaggttaagttgtacaatttattaccagagaagtcgtgggagattgatctgaaacagcttgagtacttaatcgacgaaaagactgcctgtttaatcgtgaacaacccatccaatccatgcggctcagtgttctctaagaggcacctccagaagatcctggcagtggctgcgagacagtgcgttccaatcttggccgatgagatttacggtgatatggtcttctcggactgtaaatatgaacctttggctacattatcaactgatgttcctattctttcctgcggcggacttgcgaagcgatggttggttccaggatggagactcgggtggatccttatccatgataggcgtgatatctttgggaatgaaatccgtgacgggcttgtcaagctgagccaaaggattctggggccttgcaccatagttcagggtgctcttaagagcatcttgtgcagaacccctggtgaattttaccataacacattatcttttttaaaatcaaatgcagatctttgctacggagctcttgccgccattccgggacttcgtcccgtcagaccttctggtgccatgtatcttatggtaggaattgagatggaacactttccagagttcgagaatgatgttgaatttactgaaaggttggtcgccgagcagtcagttcactgtcttcctgcaacgtgttttgagtaccctaattttattcgggtagtcattacagtccctgaggtgatgatgcttgaagcttgctcccgcattcaggaattttgcgagcagcattaccattgcgccgaggggtcgcaggaggaatgtgacaag

SEQ ID NO: 20686 - DNA, 1362 bp, synthetic construct
  misc_feature 1..1362: note = source = /note="Description of Artificial Sequence: Synthetic coding sequence"
  source 1..1362: mol_type = other DNA
atggatccctacatgatccagatgagctccaaaggcaatctcccaagcatcctggacgtgcacgtaaatgtcgggggccgctcctctgtgcccggtaagatgaaaggaaggaaagcccgatggagtgtccggcccagcgacatggcgaagaaaactttcaatccaattcgggctatcgtcgataacatgaaagttaaacctaatcctaataaaaccatgatcagccttagtattggcgatcccaccgtgtttgggaacctgcctaccgatcccgaagtcacccaggcgatgaaagacgcactggattctgggaagtataatggctacgcgcctagcattggttttctgtcatcccgcgaagagattgcaagttattatcactgccccgaagctcctctcgaagcgaaagacgtcatattgacttcaggctgttcacaagccatcgatttgtgtttagccgtgctggccaatcctgggcagaacattctagtgccccggcctggcttctccttgtacaagacccttgccgaatctatgggaattgaggtgaagctgtacaacctccttcccgagaaaagctgggagattgatctgaagcagctggaatacttgatcgacgaaaagactgcctgtcttatagtcaacaacccctcaaacccatgcggtagcgtcttctctaagcgtcacctacaaaagatcctggcagtggcagcccgtcagtgtgttccgatcctggcagacgaaatatacggtgatatggtctttagtgactgcaagtacgagccacttgccacgctgagcacagacgtgcccattctgtcctgcggaggactggcaaagagatggttggtgcccggctggaggctgggctggattctcatccacgatcgacgcgacatttttggcaacgaaattagggacggccttgtgaaactgtctcaaaggattctcggcccctgtacgattgtgcaaggtgccttaaagagcattctctgtcggacacctggagagttttaccacaacactctttcctttctgaagtccaatgcagatctctgctacggagcccttgcagccatacccggattgaggccggtgcgaccaagtggcgctatgtatttaatggtgggaatagagatggaacatttcccggaatttgagaacgacgtggagtttaccgaacgacttgtagcagaacagagtgtacactgtcttccagccacctgtttcgagtatcctaatttcatccgggtggtaatcacagtacctgaggtgatgatgttggaagcctgcagccgcatccaggagttctgtgagcaacactatcactgcgcggaaggcagtcaggaagagtgcgataag

SEQ ID NO: 20687 - DNA, 1362 bp, synthetic construct
  misc_feature 1..1362: note = source = /note="Description of Artificial Sequence: Synthetic coding sequence"
  source 1..1362: mol_type = other DNA
atggatccctacatgattcagatgtcctcgaagggaaatcttccttccatactggatgtccatgtcaacgtgggaggcagaagctcggtgcctgggaagatgaagggcagaaaggcgcgctggtcggtgcgcccatcggatatggcaaaaaagactttcaatccgatacgcgcaattgtggacaatatgaaggtgaagccaaatccgaacaaaacgatgatttcgctgtcgatcggagatccaacggtgtttggaaacctccccacggaccccgaggtcactcaagcaatgaaggacgcgctggatagtggtaagtacaacggttacgcgcccagcatcggatttctctcctcgcgtgaggaaatcgcttcctactaccattgcccagaagcacctctggaagccaaagacgtgattctcacctccgggtgttcgcaggcgatcgacctgtgccttgctgtgcttgctaatccaggccaaaacatacttgtcccacgtcctggattctccctttacaagactctggcagaatccatgggtatagaagtcaagttgtacaaccttctcccagaaaagtcatgggagatcgaccttaaacagctcgaataccttatcgatgaaaagaccgcctgtcttattgtgaacaatccctccaatccttgtggttcagtgttctcgaagcgccaccttcagaaaatactggccgtcgccgcccggcaatgtgtccctattctcgcagacgagatttacggagatatggtcttttcggattgtaagtacgagccccttgcaaccctgtccacggatgtccctattttgtcatgcggtggcctcgcaaaacgttggcttgtgcctggttggagactcggttggattctgatccacgatagacgagacatatttgggaatgagattagagatggattggtgaagttgtcacaacggattctcggcccctgtacgattgtccagggggcactgaagagcatcctctgtcgaactcctggcgaattctaccacaacactctttcatttctcaagtcgaatgcagatctctgttacggggcactggcagccatccctggtcttaggccagtgcgaccttctggggcaatgtacctgatggtgggcatcgaaatggagcactttccagagtttgagaacgacgttgaatttaccgaacgccttgtcgcagagcaaagcgtccactgcctcccagcaacctgttttgagtacccaaactttatccgagtcgtcataaccgtgcccgaagtgatgatgctggaagcctgttcaagaatccaggaattttgcgaacagcattaccactgcgccgaaggctcgcaggaagagtgcgataaa

SEQ ID NO: 20688 - DNA, 1362 bp, synthetic construct
  misc_feature 1..1362: note = source = /note="Description of Artificial Sequence: Synthetic coding sequence"
  source 1..1362: mol_type = other DNA
atggatccgtatatgattcaaatgtcttcgaagggcaatctgccaagcattctcgacgtgcacgtcaatgtgggtggccgctcaagcgtgcctggtaaaatgaaggggcgtaaggcacggtggagcgtgagaccatccgatatggcaaaaaaaacttttaatcctatacgcgctattgttgataacatgaaggtcaaacctaatcctaataaaactatgatatctctctccatcggtgacccgacggtgtttgggaatctacctaccgatccagaggtcacccaggcaatgaaggacgcgttggatagcggtaagtacaatggttacgcgcctagcattggttttctgtccagccgagaggagatcgcgagctattatcattgccctgaggctcctctggaggcaaaggatgtaattttgactagtggttgtagccaagcgatcgatctgtgcctggcagtgctggcgaacccaggccagaatattctggtgccccgcccagggttttcattatacaagaccttggcggagtcgatgggaatcgaggttaagctatacaatctgctgccggagaaatcctgggagatcgacctgaaacagctggagtaccttatcgatgaaaagaccgcctgcctgattgtcaataacccatccaatccatgcggtagcgtgttttccaaacgccacctccaaaaaatcctggctgttgcagcgcgccaatgcgtaccaatcctagcagacgaaatttacggtgatatggtctttagcgattgcaagtatgaacctctcgctaccctgtcgactgacgtgccgattctgtcctgtgggggcctggcaaaacggtggctggtaccgggttggcgtcttggctggatcctgatccatgacaggcgggacatatttggaaatgagatccgcgacggtttggtgaagctgtcccaacgcattttggggccatgcaccatcgtgcagggcgcgctgaagagcatcctttgtcgcaccccaggtgagttttaccacaatactctgagcttcttgaagtcaaatgcagacctgtgctatggcgctctggccgcgattcctggtttgcgcccagttcgaccaagcggcgcgatgtatctgatggttggtattgagatggaacactttccagagtttgagaatgacgtcgaatttaccgagcgcttggtggctgaacagagcgtccactgtttgccagctacttgcttcgagtatccaaacttcatccgcgtggtcattacggtgccagaggttatgatgctggaggcatgtagtcgaatccaagaattttgcgagcagcactatcactgcgcggagggaagccaggaagaatgtgacaag

SEQ ID NO: 20689 - DNA, 1362 bp, synthetic construct
  misc_feature 1..1362: note = source = /note="Description of Artificial Sequence: Synthetic coding sequence"
  source 1..1362: mol_type = other DNA
atggacccatatatgatccagatgagttctaaagggaaccttccttctatccttgatgtgcacgttaacgtaggagggcggagtagtgtgcccgggaaaatgaaagggaggaaagctcgatggtccgttaggccctccgatatggcaaagaaaacttttaatccaatcagagctatcgtagataacatgaaagtgaaacccaatcccaataaaactatgatatcactttccatcggagatcctacagtgttcgggaatctccctacagatcctgaagtcactcaggcaatgaaagatgctctcgattcagggaaatacaacgggtatgcaccctccataggattcctatcatcacgggaagagatcgccagttattaccattgcccggaagctcccctagaagccaaagatgtgatcttaacttctggatgctctcaggccattgatctgtgtttagctgtgcttgccaaccccggacagaacattcttgtgccccggcctgggttttctctttataagacacttgctgagtcgatgggaatcgaagttaaactctataacttgctacccgaaaagtcgtgggagatcgatcttaagcagctggagtatttaatcgacgagaaaactgcttgtctgattgtgaataatccatccaacccttgtggatctgtgtttagtaagcgccacctccagaaaatccttgccgtagctgcacggcaatgtgtgcccatcctagctgatgaaatttatggggatatggtcttctcagattgtaaatatgaacctctggctactctgtccactgacgtccccatcctttcctgtggagggctagccaaaagatggcttgtccctgggtggcggttaggatggatactaattcacgatcgccgagatatatttggaaatgaaatccgggatgggttggttaaactgtcacagagaatattaggaccctgtacaatcgtacagggagcactgaaatccattctatgcagaacacccggagagttctaccataatacactctcgtttctaaagtccaatgcagatctgtgttatggagcccttgccgcaatccctggactgcggcctgtgcggccatctggggccatgtacttgatggtcggaatcgaaatggaacacttccccgaatttgaaaacgatgtggagtttactgaacgactggtcgctgaacagagtgtgcattgtctccctgcgacatgctttgagtacccgaacttcataagggttgtcattacagtccctgaagtcatgatgctcgaagcatgttctcgcatacaggaattttgtgaacagcactatcactgtgcggaagggtcacaagaagaatgtgataaa

SEQ ID NO: 20690 - DNA, 1362 bp, synthetic construct
  misc_feature 1..1362: note = source = /note="Description of Artificial Sequence: Synthetic coding sequence"
  source 1..1362: mol_type = other DNA
atggatccgtacatgatccagatgtcgtcaaaggggaacctgccatcgattcttgacgtgcatgtgaatgtgggaggccgatcctccgtcccaggaaaaatgaaaggcagaaaggcacgttggagcgtgcggccttccgatatggcaaagaaaacttttaaccctattagagccattgtggacaatatgaaagtgaaacctaatcctaataagactatgatatcgctgtccattggagatccaactgtgtttgggaacttgcctaccgacccagaggtcacgcaagcaatgaaggatgcactcgattcgggtaaatacaacggctacgctccatccattggcttcctgtccagccgcgaggagattgcgagctactaccactgtccagaggcacctcttgaagcgaaagacgtcattcttacctcgggatgttcccaagcaatcgacctttgcctggcggtgcttgccaaccccggccagaatatactggtccctcggccaggattctcactctacaagactttggctgaaagcatggggattgaggtgaagctgtacaaccttctgcctgaaaagtcgtgggaaattgaccttaagcaactggaatacctgatcgatgagaaaactgcatgccttatagtgaataacccaagcaacccctgtggatccgtgttttcgaagcggcaccttcaaaagatcctggcagtggcggcacgccaatgtgttccaatattggccgatgagatatacggcgacatggtgttttcagattgcaaatacgagccactggccaccctgtcaactgatgtgcccattctgtcctgcggaggtcttgcaaagaggtggctcgtgccgggctggagactgggctggatccttattcacgatcgtcgggacatattcggcaatgaaatcagagacggcttggtcaagttgtcgcaacggattctgggcccctgcaccatcgtgcagggtgcacttaagtcgatactttgcagaacccccggggaattctaccataacacgctgagctttctgaagtcgaatgcggatctctgctacggcgcattggcggcgatcccaggtcttagacctgtcaggccctcaggagcaatgtaccttatggtcgggattgaaatggaacatttcccagaattcgagaacgacgtggaatttactgaaagacttgtggcagagcagtcggtgcattgtctccctgcaacttgttttgagtatcctaatttcattagggtggtaattacggtgcctgaagtgatgatgcttgaagcatgcagtcgtatccaagaattttgtgaacaacattaccattgtgcagaagggagccaagaagaatgtgataaa

SEQ ID NO: 20691 - DNA, 1362 bp, synthetic construct
  misc_feature 1..1362: note = source = /note="Description of Artificial Sequence: Synthetic coding sequence"
  source 1..1362: mol_type = other DNA
atggacccttacatgatccaaatgtcctctaagggcaatctgccaagcatcctggatgttcacgtaaatgtgggggggcgctcgtcagttcctggcaaaatgaagggacgcaaagcgaggtggtccgtgcggccatctgatatggctaagaagacattcaatccaataagagccatagtagacaacatgaaagtgaagccaaaccctaacaaaacaatgataagcctctccatcggtgatcctacggtcttcgggaatctcccaactgatcctgaggtgacacaagcaatgaaagatgctctggatagcggaaagtataacgggtacgcgccatccatcggatttctgagctcacgtgaagagatcgccagctactatcactgtcccgaagcacctctcgaggcaaaagatgtgatcttgacgtctgggtgttcccaagccattgatctgtgtctggccgtactggccaatcccggacagaacatactggtgcctaggccaggctttagtctgtacaagactcttgccgagtccatggggattgaagtaaaactgtataatctgctgccagagaaaagctgggagatcgatttgaaacagttagaatatctgatcgacgagaagactgcttgtcttatagtgaacaaccctagcaacccatgcggctctgtctttagcaagcgtcacctccaaaagattctggcggtggccgccagacagtgcgtgcccattttggctgacgagatttacggagacatggtgttctccgactgcaagtacgagccactcgccactctctctaccgacgtgcctatcctgtcctgtgggggtttggcaaaaaggtggctggtgccggggtggcggctcggatggattctaatacatgatcgtagggacatcttcggaaacgaaattcgggacgggttagtgaagcttagccagcggatactgggcccttgcaccattgtccagggggctctcaaatctattctctgccgcacacctggggagttctaccacaacacactcagcttcctgaagtcaaacgccgacttgtgttatggcgctctggccgccatccctggccttagacccgtgaggccctccggcgcaatgtatttgatggtcggaatcgagatggaacactttccagaattcgaaaacgacgtggagttcacggagagactggtggcagagcagtctgtacactgtctacctgctacatgctttgagtacccaaactttatcagggttgtcatcacggtgccagaggtgatgatgttggaggcctgcagcaggattcaggaattctgcgagcagcactaccactgcgcagaagggagtcaggaggagtgtgataaa

SEQ ID NO: 20692 - DNA, 1362 bp, synthetic construct
  misc_feature 1..1362: note = source = /note="Description of Artificial Sequence: Synthetic coding sequence"
  source 1..1362: mol_type = other DNA
atggatccttatatgatccagatgtcgagcaagggaaacctcccatccattctcgatgtgcatgtgaacgtgggtgggcgatcctcggtcccaggaaaaatgaaaggacgcaaagcgaggtggagcgttcggccctcggatatggctaaaaagacgttcaatcctatccgagcaatcgttgacaatatgaaggtgaagcctaaccctaataagactatgatcagcctcagcatcggcgatcccactgtattcggcaatctcccgaccgaccctgaagtcacgcaagccatgaaggatgctctcgactccggaaagtacaacggctacgctccgagtattggctttttgtcctcaagggaggaaattgcgtcgtactaccactgccccgaagcgccattggaggccaaggacgtgatcctgactagcgggtgctcgcaagccatcgacttgtgcctggctgtgttggccaaccctggacagaacattctcgtgccgcgcccgggattttcgttgtacaagactctcgccgaatcaatgggtatcgaggtgaagctgtacaacctgctgccggaaaaatcatgggagatcgacctgaagcagctcgagtatttgatcgatgaaaagactgcctgcctgattgtgaataatccgtccaacccttgtggatcggtgttttcgaagcgccaccttcagaaaattctggcggtcgcggcaagacagtgcgtgcccatcctggccgacgaaatctacggcgacatggtgttctcagactgcaagtacgagcctctggccaccctcagcacggatgtcccaatcctgtcgtgcggaggcctggctaagcgctggctggttccgggatggcgcttgggatggatactgattcatgacaggagggatatcttcgggaacgagatccgcgacggtctggtgaaactgtctcagcgcatactcggaccatgcaccatcgtccaaggcgcgttgaagagcatcctctgccggaccccaggagaattctaccacaacactctgtccttcctcaagtcgaatgcggatctctgttacggcgcactggctgcaatccctggtctgcggccggtgaggccttcgggagccatgtacctgatggtcggcatcgagatggaacatttcccagaattcgaaaatgacgtcgagttcaccgaacggcttgtcgcagaacagagcgtgcactgtctccccgcaacctgtttcgaatatcccaactttatccgagtcgtgatcaccgtgccggaggtgatgatgctggaagcatgctcgagaatacaagagttctgcgaacaacactaccactgcgccgaggggtcgcaggaggagtgtgacaaa

SEQ ID NO: 20693 - DNA, 1362 bp, synthetic construct
  misc_feature 1..1362: note = source = /note="Description of Artificial Sequence: Synthetic coding sequence"
  source 1..1362: mol_type = other DNA
atggatccctatatgatccagatgtcttccaagggtaaccttccaagtattctggatgtgcacgttaacgtcggtggccgaagttccgtgcctggaaaaatgaagggaagaaaagcacgatggtccgtgcgtccatctgacatggctaaaaagacttttaatcctattagagcaatcgtagacaatatgaaagtcaaaccaaacccgaacaagaccatgattagtttatctattggagatccaactgttttcgggaatctgccaacagatcctgaagttactcaggccatgaaagatgcacttgattctggtaagtacaacggatacgcccctagtattggatttctctcctcccgtgaagagatcgcatcatactatcactgtccggaagcacctcttgaagccaaggatgtgattcttacgtcaggatgctcacaggccattgatctatgcttggccgtcttggctaaccctggacagaacattctggtgccacggccaggattttcattgtacaaaactttggcagaatcaatgggtatcgaagtaaaactgtataacctgctcccagaaaaatcctgggaaattgatcttaaacaactcgagtatcttattgatgagaaaacagcatgtctcatcgtaaataacccatccaatccatgtggatcggtgttttctaaaagacaccttcagaagattcttgcagtcgcagcgcggcagtgcgttccgatcttggcagatgaaatctacggcgatatggttttttctgattgtaaatatgaaccattggcgacattgtcaacagatgtccctattttgtcctgcggaggactcgcaaaaagatggcttgtgccaggctggcgactcggatggatactcattcatgatagacgagatatttttggcaacgaaataagagacggattggttaaattgagtcaaaggatactgggaccgtgtactattgtacagggagccttaaaaagtattttgtgtcgcacaccgggagaattttatcataatacactttctttcttgaaatcaaatgcagacctctgttacggggctctagcagcaattcctggcttgcgaccagttcgtccgtccggtgccatgtatctcatggtcggtattgaaatggaacattttccagagtttgaaaatgacgtcgaatttacagagagactagtagcagagcaatccgtgcattgcttgccagctacgtgctttgagtatcctaatttcatacgtgtcgtgatcacagttcctgaggttatgatgctcgaagcttgcagccgtatacaggagttttgtgagcaacattaccattgtgcagaaggaagtcaagaagaatgtgataag

SEQ ID NO: 20694 - DNA, 1362 bp, synthetic construct
  misc_feature 1..1362: note = source = /note="Description of Artificial Sequence: Synthetic coding sequence"
  source 1..1362: mol_type = other DNA
atggatccctatatgatccagatgtcaagcaagggcaacctgccatcaattctcgacgtccatgttaatgtcgggggtaggtcgtcagtgcccgggaagatgaaggggagaaaggcccgctggagtgtgcgaccgtcagatatggcaaagaaaacgtttaatccaattagagcaattgtagataacatgaaggtcaagcccaatccaaataagaccatgatttccctctcgataggtgaccctactgtttttggaaacctgcctaccgatcctgaagtaactcaagccatgaaggatgcacttgatagcggtaagtacaatggatacgccccctccatcggatttctgagttctcgtgaggaaatcgcatcctactatcactgcccagaagcaccgttggaggccaaggacgtgattctgacttcagggtgctcccaggccatcgacctttgcctcgcggtgctggcaaaccctgggcaaaacattctggtgccacggcctgggttctcactttacaaaacccttgcggaaagcatgggtattgaggtgaaattgtacaacctgcttcctgaaaaatcgtgggagattgatctgaaacaactggaataccttatcgatgaaaagaccgcatgtctcattgtgaacaacccttcgaatccttgcggctcggtgttctcgaaaagacatcttcagaagatcctggcagtcgcagctagacagtgtgtgcctatactcgcagatgagatatacggagacatggttttttcggattgtaagtacgagcctcttgctactctgtcgaccgacgtgccaatcctctcctgtggtggactggctaagcggtggcttgtgccaggatggcgtctcggatggattttgatccatgacagacgagatatctttggaaatgaaattcgagatggacttgtcaaactttcgcagaggatcttgggtccttgcactattgtgcagggtgcacttaaatctattttgtgtagaaccccaggtgaattctaccacaatacgctgtccttccttaagtcaaacgccgacctttgttacggagccctcgcagcaatacctggcctgcggcctgtgcggccaagcggtgcaatgtacctcatggtcggaatcgaaatggagcattttcctgaatttgaaaacgacgtggagttcaccgaacggctggtggcggagcaatccgtgcactgtctcccggcaacttgtttcgagtaccctaacttcattagggtggtgattacggtcccggaagtcatgatgctcgaggcatgttctcgtattcaagaattctgcgaacagcattaccactgtgcagagggatctcaggaagagtgtgataag

SEQ ID NO: 20695 - DNA, 1362 bp, synthetic construct
  misc_feature 1..1362: note = source = /note="Description of Artificial Sequence: Synthetic coding sequence"
  source 1..1362: mol_type = other DNA
atggatccttacatgatccaaatgtcgtcgaagggtaaccttccatcgatcctggatgtgcatgtgaacgtcggtggcagatcctcggtccccggcaagatgaaggggcgtaaggcacggtggagcgtgcgtccatcagacatggcaaagaaaacttttaaccctattagggcaatcgtcgacaacatgaaagtcaagccgaaccctaacaaaactatgatttcactttcaattggcgaccctactgtctttggtaatctcccaaccgatccagaggtcacccaggccatgaaggacgcacttgattcgggtaagtacaatggttacgctccctcgatcggttttctgagcagcagagaggaaattgccagctactaccattgccccgaggcgccactggaagcaaaagacgtgatacttactagcggttgttcccaagcaattgacctttgcctggccgtgcttgcaaatcctggacaaaacattcttgtccctagaccaggcttttcactctacaagaccctggcagaatcaatgggaattgaagtgaagttgtacaatctgctgcccgagaagtcgtgggaaatcgatttgaaacaactcgagtacctcattgatgagaaaactgcatgtctcattgtgaacaatccctcgaatccctgtggatccgtgttctcaaagcgccacctccaaaagattcttgcagtggctgcgcgccagtgtgtcccaatactggcagatgaaatctacggggacatggtcttttccgattgcaagtacgagcctctggccaccctttccaccgacgtgcctatacttagctgcgggggattggcaaagaggtggctggtgccaggatggagactgggatggattttgattcatgatagacgtgacatttttgggaacgagatccgcgatggtcttgtgaagctgtcccaaaggattctgggaccttgtactattgtgcaaggtgccctcaagagcatactgtgccgcaccccgggggagttctaccataacaccctgtcattcctgaaatccaacgcggacctttgctacggtgccctcgccgcgattcctggactcagaccggtccgcccttcaggtgcaatgtacctgatggtcggcatagaaatggaacattttccagagtttgagaacgatgtcgagtttactgaacgcttggtcgccgagcaatccgttcattgccttcctgccacctgcttcgagtacccaaacttcatccgggtggtgatcacggtgccagaagtgatgatgctggaagcctgctcacggatacaagagttctgtgaacagcattaccactgtgcagaagggagccaggaagaatgtgataag

SEQ ID NO: 20696 - DNA, 1362 bp, synthetic construct
  misc_feature 1..1362: note = source = /note="Description of Artificial Sequence: Synthetic coding sequence"
  source 1..1362: mol_type = other DNA
atggatccctacatgatccaaatgtcatcaaaaggaaatctgccttccattcttgacgtccacgtgaatgtgggaggaagatcctcagtgccgggaaagatgaagggacgcaaagcacggtggtccgtccggccttcggatatggcaaagaaaactttcaacccaattagagccattgtggataacatgaaagttaagcctaacccaaacaagactatgatcagcttgtcgattggggatcccacggtctttggtaacctccctaccgatcctgaagtgacccaggctatgaaagatgcgctggattcgggcaagtacaacggctatgcgccatcaataggctttctctcatcgcgagaggaaattgcatcctactaccattgcccagaggcaccactcgaggcaaaggatgtgatccttacttccggatgctcgcaagcgattgatctgtgtctggcggtgctcgcaaacccaggccaaaacatccttgtccctcgccctggattttcgctttacaagacccttgcagagagcatgggaatcgaggtgaagctgtacaacctgcttccggagaaaagctgggaaatcgatcttaagcaactggagtacctgatagatgaaaagacggcttgtctgattgtcaataacccaagcaacccatgcggatccgtgttctcgaagcgtcaccttcaaaagattctggctgtcgctgcacgacagtgtgtgccgatcctggcagacgagatttacggagatatggtgttttcggactgcaagtacgaacctttggcaactctgagcaccgatgtgcccatcctgagctgtggagggctggcaaagagatggctggttcctggatggcggcttggatggattctcattcacgataggcgtgacattttcggcaacgaaattcgcgacggcctggttaagttgtctcagaggattctgggtccatgtacgatcgtgcaaggagcgctcaagtccattctctgccgcaccccaggggaattctaccataatacgttgtcatttcttaaaagcaatgcagatttgtgttacggcgcacttgccgccatccctggtctgcggccagtgcgcccgtccggtgccatgtatctgatggtgggaattgagatggaacatttcccggagtttgagaacgatgtggaattcaccgaaagacttgtggctgaacagtcggtgcattgtctgcccgcaacctgtttcgagtaccctaatttcataagagtggtgattaccgtgcccgaagtgatgatgctggaagcatgttcacggatccaagagttttgtgagcagcattaccactgcgcagagggttcgcaagaggaatgcgacaaa

SEQ ID NO: 20697 - DNA, 1362 bp, synthetic construct
  misc_feature 1..1362: note = source = /note="Description of Artificial Sequence: Synthetic coding sequence"
  source 1..1362: mol_type = other DNA
atggatccatacatgatacagatgagcagtaagggtaacctgcccagcatactagatgtgcacgtcaatgtcggtgggcgatcctcagtgcctggcaaaatgaagggcaggaaagcccggtggagtgttcggcccagcgatatggctaagaagaccttcaatcccatacgtgctatagtggataacatgaaagtgaagccaaatccaaataagaccatgatctctctgagcattggcgaccccaccgtgtttggcaatttaccaactgaccccgaagtgacacaggccatgaaagatgccctggactctggcaagtacaacgggtacgccccttctatcgggtttctatcttcccgggaagaaatcgcttcctattaccactgtcctgaggccccactggaagcaaaagacgtgattctgacaagtggatgtagccaggctatagatttgtgcctggctgttctggctaatcctgggcagaacatcctggtgcctagacccgggttcagtctgtacaagactcttgccgagagtatgggaattgaagtgaagctttacaacctgctgcccgagaaaagctgggaaatagatctcaagcagctggaatatctgattgatgagaagactgcatgcctgattgtgaacaatccttccaatccctgtggaagcgtcttttccaaacggcacctgcagaaaatacttgccgtggcagcccgacagtgcgtgccaatactagccgacgaaatttatggcgacatggttttttctgactgtaagtacgagcccctcgccaccctgtctacagacgtccccatcctgtcttgcggcgggctggccaaacggtggctggttcctgggtggcgtctaggttggattctcattcacgatcgccgggacatttttggaaacgagatacgcgacggcttagtgaaattatcccagaggattttaggaccttgtaccatagttcaaggcgctctgaagtctatactgtgccggacaccaggggaattttaccacaataccctgtcttttctgaaatcaaatgccgatctctgctatggcgccctcgccgctatcccagggcttcgaccagttagaccttcaggcgccatgtacttaatggtgggcattgaaatggagcattttcccgagtttgagaacgatgtggagtttactgaacggctggtggccgagcagagcgtgcattgcctgcccgcaacatgtttcgagtacccaaactttatacgcgtggtgatcaccgtgcccgaggtgatgatgctggaggcctgttctcgcatccaagagttttgcgaacagcactaccactgcgcagagggcagtcaagaggaatgcgataaa

SEQ ID NO: 20698 - DNA, 1362 bp, synthetic construct
  misc_feature 1..1362: note = source = /note="Description of Artificial Sequence: Synthetic coding sequence"
  source 1..1362: mol_type = other DNA
atggatccttacatgattcaaatgtcctcgaagggcaacctaccctccatcctggatgttcacgtcaacgttgggggtcgaagttccgtcccagggaagatgaaagggagaaaggcacgttggagcgtacgcccttccgacatggcaaagaagaccttcaatcctatacgggcaatagttgataatatgaaggttaagccgaatccaaataaaactatgatttcactctcaatcggtgacccaacggtattcggcaatctcccgaccgaccccgaagtcacccaggcgatgaaagatgcgctggactctggtaaatataatggttatgctcctagcataggctttctgagcagtcgtgaggaaattgctagctactaccactgtcccgaagccccgctggaggccaaggatgttatcttaacctcaggctgttcccaggcaatagacctgtgcctagccgtccttgcaaaccctggacagaacattcttgtccccaggccaggattctcactctacaagacacttgcagaatcaatgggcattgaagtaaaactctataatcttttgcctgaaaagtcatgggaaatcgaccttaagcaactggagtatctgatagacgaaaaaacggcgtgcctcatagttaacaacccctccaatccctgcggttcggtcttttctaagcgacacctgcagaagatactggcagttgcagctcgtcaatgcgtgcctatccttgctgatgaaatatatggtgacatggtattttcagattgtaagtatgaaccacttgccacactttctactgacgtaccgattctctcttgcggcggtttggccaagaggtggctcgtgcccggttggcggttgggttggatcctaattcacgaccgaagggatatcttcggcaacgagatacgagacggcctggttaagctgagccagcggattctaggaccctgcacgattgtccagggcgctctcaagtcgattctctgccgaactcctggggaattttaccacaacaccctgagtttcctaaagagcaatgcggacctgtgctatggagccttggctgctatacccggtcttcgccctgtgcggcccagcggcgccatgtacctgatggtggggattgagatggagcattttcccgaatttgaaaatgacgttgaattcacggagcgccttgtggccgaacaatcagtccactgcttgccagctacctgctttgagtaccctaacttcatccgcgttgtgattacggttcctgaagttatgatgttggaagcctgttcccggattcaagaattttgtgagcagcactatcactgtgcagagggatctcaggaagaatgcgataaa

SEQ ID NO: 20699 - DNA, 1362 bp, synthetic construct
  misc_feature 1..1362: note = source = /note="Description of Artificial Sequence: Synthetic coding sequence"
  source 1..1362: mol_type = other DNA
atggatccatacatgattcaaatgtcctcaaaggggaacctgccttccatccttgacgtgcatgtgaatgtggggggacggtcatcggtcccgggcaagatgaaaggccgcaaagcccgctggtcagtgcgccctagcgacatggcgaagaaaactttcaacccaatccgcgcgatcgtcgacaacatgaaggtcaagccaaacccgaacaagaccatgatttcactgtccattggcgatccgactgtgttcgggaaccttccgaccgacccggaggtcacgcaggcaatgaaggacgccctggattccggcaagtataacggatacgccccatccatcggtttcctgtcatcgcgcgaagaaatcgcgagctactaccactgcccagaggctccactggaggccaaggacgtgatcctgacctcgggctgttctcaggcaattgacctgtgcctcgcggtcctggccaatcccggacaaaacatcctggtgccaagacctggattctccctgtacaagaccttggcggaatcgatggggatcgaggtgaagctctacaatctgctgcccgaaaaatcgtgggaaatcgacctcaagcaactcgaatacctgatcgacgaaaagaccgcctgtctcattgtgaataaccccagcaacccgtgcggatctgtcttttccaagcgtcacctccagaagatcctcgctgtcgctgcacgccagtgtgttccaatcttggccgacgagatttacggagatatggtgttttcggactgcaaatacgagcctctggctaccctgtctaccgacgtgcccatcctgagctgcggcggactcgctaagcggtggctggtcccgggatggagactgggctggatcctgatccatgaccgccgggacatctttggcaacgagatccgggatggtctggtgaagttgtcgcaacggatcttgggaccgtgtactatcgtacagggggcgctgaaatccatcctttgtcgcactccgggggagttctaccataacaccctgtccttcctcaagtcaaacgctgacctgtgctacggcgcgctggcagctatcccggggctccgcccggtgcgcccctcgggcgccatgtaccttatggtgggtatcgaaatggaacattttcccgaattcgaaaatgatgtggaatttactgagcggctggtggcggaacagtcagtgcactgcctgccggcaacctgcttcgagtacccgaatttcatcagagtcgtcatcactgtgcccgaggtgatgatgctcgaggcttgttcgcggatccaggagttctgcgaacagcattaccactgtgctgaaggatcccaggaggaatgtgataag

SEQ ID NO: 20700 - DNA, 1362 bp, synthetic construct
  misc_feature 1..1362: note = source = /note="Description of Artificial Sequence: Synthetic coding sequence"
  source 1..1362: mol_type = other DNA
atggatccatacatgatccagatgtcctccaaagggaatctaccctctatcctggacgtgcacgttaacgtgggcggtcgcagctccgttccaggcaagatgaaagggcggaaagctaggtggtccgtacggcctagcgatatggccaagaaaaccttcaatccaattcgcgcgatcgtggataacatgaaggtcaaacccaacccgaacaagacaatgatttcactctctattggtgatcctaccgttttcgggaacctcccaacagaccctgaggtcactcaggcaatgaaggatgccctcgacagcggcaaatataatggctacgcaccaagcattggcttcctgtcctctcgagaagaaattgccagttattaccattgcccggaagcaccgctggaggcaaaagacgtgatactgacctctggctgttctcaggctatcgatctctgcctcgcggtgctggctaatcccggccaaaacatactggttcctcggcccggtttttctctgtacaaaacactagctgagagcatggggatcgaggtgaaactgtacaacttactccctgaaaagagttgggagattgatctgaagcagctagaatacctaatcgacgaaaagacagcctgtttaattgtcaacaatccgtcgaacccatgtggatccgtgttctccaaaagacacctacagaagatcctagcagtagccgctcgtcagtgcgtgccaatcctcgccgacgagatttacggtgacatggtgttcagtgactgcaaatacgaacctctggcgacgctttcaacggacgttccaatcctatcatgtggagggctcgcaaaacgctggttagtgcccgggtggaggctaggatggatcctgattcatgacaggagagacatctttggaaacgaaatccgcgatgggcttgtgaaactctcacagagaatactcggcccctgtacaatcgttcagggcgcgttaaagagcatcctgtgtcgtacacccggggaattctaccataatactctgagttttctgaagtcaaacgccgatctctgctatggagccctggctgctatccctggattaaggccagtacgcccgagcggtgccatgtacctgatggtgggcattgagatggaacactttccagaatttgagaacgacgtggaattcacagagagactggttgcagagcagagtgtacactgtctgcctgccacttgttttgaataccccaattttatacgagtggtgattaccgtgcccgaagtgatgatgctcgaggcatgcagccggatccaggagttctgcgaacagcactatcactgtgcggagggaagccaggaggagtgcgacaaa

SEQ ID NO: 20701 - DNA, 1362 bp, synthetic construct
  misc_feature 1..1362: note = source = /note="Description of Artificial Sequence: Synthetic coding sequence"
  source 1..1362: mol_type = other DNA
atggatccatatatgattcagatgtccagtaaggggaatctaccgtcgatactggacgtacatgtcaatgttggcggaaggagcagtgtgcccggaaagatgaaggggcggaaggctcgctggagcgtacgaccaagcgacatggcaaagaagactttcaatcccataagggcgatcgtggataacatgaaagtgaaaccaaatccaaacaagacaatgatctctttgagtataggagaccccacggtctttgggaacctgcctaccgatccggaagtgacccaggcgatgaaagatgctcttgactctggcaagtacaatggatatgcaccatccatcgggttcctgagctctcgcgaggagattgcctcatactaccactgtcctgaggctccactggaggctaaggacgtcatactcacctctggctgttctcaggccatagatctctgcctggccgtgctcgctaacccgggccagaatattctcgtcccccggcctggcttttcactttacaagactcttgcagaaagcatgggtattgaggtcaaactgtataatcttcttccggaaaaatcttgggaaatcgacctcaaacaactggagtacttaatagacgagaaaactgcgtgtcttattgtaaataatccaagcaatccttgcggctccgtcttctctaagcggcacctgcagaaaatccttgctgttgccgcccgccagtgtgtcccaatcttggctgacgagatatatggtgatatggtgtttagcgactgcaagtacgagcctctggccaccctctcaactgatgtgcctatcctgtcttgtggcggcttggccaagaggtggctcgtaccaggatggagactgggctggattctgatccacgaccgcagagacatttttggtaacgagattagggacgggttggtgaagctgtcacagcggatcctggggccgtgcactattgtgcaaggggctttaaagtctattctgtgccgcacacccggggaattctatcataatactctgtcctttcttaaaagcaacgccgacctctgttacggcgcgctggccgccattccagggttacggcccgtgaggccgtcaggcgctatgtatctgatggtgggcatagaaatggagcacttccccgagttcgaaaatgacgtggagtttactgagagattggtggccgagcagagtgtgcattgcctccctgccacctgctttgagtaccctaattttatcagggtggtgatcactgtgcctgaggttatgatgctcgaggcgtgcagccgaattcaggagttctgtgagcaacattatcattgcgcggaggggtcccaggaggagtgcgacaaa

SEQ ID NO: 20702 - DNA, 1362 bp, synthetic construct
  misc_feature 1..1362: note = source = /note="Description of Artificial Sequence: Synthetic coding sequence"
  source 1..1362: mol_type = other DNA
atggatccttacatgatccagatgtcgagcaagggaaaccttccatcaatccttgatgtgcatgtgaatgtcggcggacggtcctccgtcccaggaaaaatgaagggccggaaagccagatggagcgttagacccagcgacatggctaagaaaactttcaaccctatccgcgcaatcgtagataacatgaaggtgaaaccaaatcccaacaaaaccatgataagcctctccataggtgatcctactgtgttcgggaatctgccgacggaccctgaggttacccaagccatgaaagatgcgctcgatagcggtaagtataacggatacgcacctagcattggttttctcagcagccgggaagagattgcatcctactaccactgtcctgaggccccacttgaagccaaggatgtcatactgacctcaggatgttcccaagcaattgatctgtgcctggcagtccttgcgaaccctggtcagaacatactggtgcctcggccagggttttcgctttacaagactcttgcagagtccatgggaattgaagtcaagttgtacaaccttcttccagagaaatcgtgggagattgatctgaagcagctggaatacctgattgatgaaaagactgcttgtcttattgtgaacaacccttcgaacccatgtggatctgtgttctcgaagcgccatctccaaaagattctggcggtggcggcgcgccagtgtgttcccattctggcagatgaaatctatggagacatggtgttttctgattgtaagtacgagcctctggcaactctttccaccgatgtgcctattctttcctgcgggggccttgcgaaacgctggttggtgcccggatggcgactcggatggattctcattcatgaccgtcgagacatttttggaaatgaaatccgtgatggtctggtcaaactttcacaacgcattctcgggccgtgtactattgttcaaggagcgttgaagtcaattctctgtagaacccctggagaattctaccataacactctctcgtttctgaagtcgaacgccgatctttgttacggagccttggcagcgatccctggcctgcgtccggtaagaccatcaggtgccatgtaccttatggtgggaatcgagatggaacattttcccgaatttgagaacgacgtggagtttaccgagaggctggtggcagagcaatcagtgcattgtttgcctgccacgtgctttgagtaccctaatttcattagggtcgtgattaccgtgccagaagtcatgatgcttgaagcatgtagccgtattcaggagttctgtgagcaacactaccactgtgcagaggggtcacaagaagaatgcgataaa

SEQ ID NO: 20703 - DNA, 1362 bp, synthetic construct
  misc_feature 1..1362: note = source = /note="Description of Artificial Sequence: Synthetic coding sequence"
  source 1..1362: mol_type = other DNA
atggatccctatatgatccagatgagctccaagggaaacctgccaagtattctggacgtgcatgtgaacgtcggtggacgatcgagcgttcctggaaaaatgaagggacgaaaagcacggtggtcggtgaggccctcagatatggccaagaaaaccttcaacccaattagggccatcgtggacaacatgaaagtgaagcctaaccctaacaagacgatgattagcctgtccattggagatccaactgtgtttggcaacttgcctaccgatcccgaggtgacccaagctatgaaagacgcactcgactccggtaagtacaatggatacgcaccctccatcggatttcttagctcgcgggaagaaatcgcaagctactaccattgtccagaagctccactggaggcaaaagatgtcatcctgacctcgggatgttcacaagcgattgatctttgccttgcagtgcttgcaaaccctggacagaatatcctggtgccccgccctggctttagcctgtacaagactcttgccgaatccatgggtatagaggtcaagttgtacaacctgctgcctgagaaaagctgggagatagatcttaagcagcttgagtatcttatcgacgaaaagactgcctgtcttattgtcaacaacccttcgaacccctgcggtagcgtattctcaaaaagacatcttcaaaagattcttgccgtggcagcgagacaatgtgtcccaatcctggctgacgagatctacggagacatggtcttttccgattgtaagtacgagccacttgcaactctgtcaactgacgtcccaattctgagctgtggaggactggcgaagcgatggctcgttccaggctggaggttgggatggattcttatccatgaccgccgggacatttttgggaatgagattcgtgatggactggtgaagctctcccaacggattctgggtccctgtactattgttcagggagcattgaagtcaatcctgtgccgtactcctggcgagttttaccataacacgctttcctttcttaagtcaaacgccgatctgtgctacggcgcactggcggcgattcctggactgaggcctgtcagaccctcgggtgccatgtacctcatggtggggatcgagatggagcatttcccagaattcgagaatgatgtggaattcaccgaacgccttgtggccgaacaaagcgtgcattgcctcccggcaacctgttttgagtacccgaacttcatcagagttgtcattaccgtcccggaagtgatgatgctggaagcatgtagcagaatccaggaattctgtgaacaacactaccattgtgcagagggcagccaggaggaatgcgataag

SEQ ID NO: 20704 - DNA, 1362 bp, synthetic construct
  misc_feature 1..1362: note = source = /note="Description of Artificial Sequence: Synthetic coding sequence"
  source 1..1362: mol_type = other DNA
atggacccttatatgatccaaatgtcctccaagggaaaccttcccagcattcttgatgtccatgtcaacgtgggcgggagatcgtcagtccccggtaagatgaaggggagaaaggcacgctggtccgtccggccttcggacatggcaaaaaagactttcaatccaatacgagcgattgtggataacatgaaggtcaagccaaaccccaacaaaaccatgatctcactgtcgattggtgaccctaccgtttttggaaacctgcccaccgatcctgaagtcactcaggcaatgaaggacgccctggatagtggaaagtacaatggatacgccccatccattggatttctcagttcacgggaagagattgcttcgtactaccattgtccagaagcacctctcgaggcaaaagacgtcattctgactagcggctgcagccaagcaatagatctttgtcttgcagttttggcaaatcctggccagaacattctcgtgccccgtccgggcttctcactttacaaaaccctcgcggagtcaatgggtattgaggtgaaactgtacaacctccttcctgaaaagtcctgggaaattgacctcaagcaactcgaatatcttattgatgaaaaaaccgcgtgtctgatcgtgaataacccaagcaatccctgcgggtccgtgttcagcaagaggcatcttcagaagatcctcgcagtcgcagcaagacaatgcgtgcctattttggcagacgaaatctatggtgacatggtgttttcagattgcaagtacgaacctcttgccaccttgtcgaccgacgtgcctattctgtcatgcggaggccttgcaaaacgttggctcgtgccaggttggagacttggatggatccttattcatgatcgacgcgatatcttcggaaacgaaatacgagatggactggtgaagctctcacagcgtatcctcgggccctgcaccattgtgcaaggtgcccttaagtcgattctttgcagaactccaggagagttctatcacaacaccctttcctttctgaagtcgaatgctgacttgtgttacggagcgctcgcagcaatccctggactgcggcccgtaagaccctccggagccatgtacctgatggtgggaattgagatggagcattttccagaatttgaaaatgacgttgagtttaccgagcggctcgtggcagaacagtcggtccactgccttcccgcgacctgctttgaatacccaaacttcattcgcgtggtcatcactgtgccagaggtgatgatgcttgaggcatgttcgcgcatacaggaattctgtgagcaacattaccattgcgcagaaggttcccaggaagaatgtgataag

SEQ ID NO: 20705 - DNA, 1362 bp, synthetic construct
  misc_feature 1..1362: note = source = /note="Description of Artificial Sequence: Synthetic coding sequence"
  source 1..1362: mol_type = other DNA
atggacccctacatgatacaaatgagtagcaaaggaaacctaccttcaatcttggacgtgcatgtaaatgtggggggcaggtcaagcgtgccagggaagatgaagggcaggaaagcccgttggtccgtgagaccttcagacatggcgaaaaagacttttaaccccatacgcgccatcgtagacaatatgaaggtgaagcctaatccaaacaagaccatgatctcactgtcaatcggggaccccactgtatttggaaatctgcctacagatccagaagtgacacaagccatgaaggacgccctggactcaggaaagtacaacggctatgcacccagtatcgggttcctgagttcccgggaggaaatcgcttcctattatcactgtcccgaagcccctctcgaggcaaaagatgtgatcttaacttctggatgctctcaagccattgacctttgcctggccgtgctcgcaaaccccggccagaacattttggtgcccagaccgggtttcagtctctataagacgctggcagagagcatgggaatcgaggtgaaactctataatttactcccggagaagagctgggagatcgacctaaaacagcttgagtacttgattgacgagaaaactgcttgtctgatcgtaaacaatccctccaacccctgcgggtcggtgttcagcaaaagacaccttcagaagatactcgctgtagcagccagacagtgcgttccaatacttgcagacgagatttacggggatatggttttctcggactgtaagtatgagcccctggccacgttatcaacagacgtgcctatattgtcttgtggcggactcgctaagcgctggctggtgcctggctggaggctggggtggattctgatccatgatcggcgagatattttcggcaatgagatcagggacgggctcgtgaagctttcccagcgaatactaggcccatgtactatcgtgcagggagccctgaagtccatcctttgtcgaacccccggtgagttctatcacaatactctcagctttctgaagtctaacgccgatctgtgttacggggctctcgcagccatacccggcttaagaccggtgcggccatcaggggcgatgtatttgatggttgggattgagatggaacatttccctgaattcgaaaacgacgtggaatttacggagagacttgtggccgagcaatctgttcattgcctgcctgcaacatgtttcgagtaccccaattttatccgggttgtgattaccgtgcctgaagtgatgatgctggaggcctgcagtcgcatccaggaattctgcgaacagcactaccattgtgccgaagggagccaggaagaatgtgacaag

SEQ ID NO: 20706 - DNA, 1362 bp, synthetic construct
  misc_feature 1..1362: note = source = /note="Description of Artificial Sequence: Synthetic coding sequence"
  source 1..1362: mol_type = other DNA
atggatccgtacatgatccaaatgtcgtctaaaggaaatctgccatcaatcctggacgtccatgtgaacgtgggcggaagaagctcggtcccggggaagatgaagggacgcaaagctagatggagcgtgcgcccaagcgatatggcgaagaaaacgtttaaccctatcagagcgatagtcgacaatatgaaagtgaagccgaatccaaataagactatgatctcgttgtccataggagatcccaccgtctttggcaaccttccgactgaccctgaggtcacgcaggcgatgaaagacgcactcgactcaggcaagtacaacggctacgcgccgtcgatcggattcctcagctcgagagaggaaatcgcttcgtactaccactgtcctgaagcacccttggaagccaaggacgtgatcctgacctcgggatgctcacaagccatcgatctctgcctggcggtcctggcaaaccctggacagaacatccttgtgccacggccgggcttctcgctctacaagaccctcgcggaaagcatgggaatcgaagtgaagctgtacaacctgctcccggagaagtcatgggaaattgatctcaaacagctcgagtatctgatcgacgaaaagactgcttgcctgatcgtcaataacccatccaatccgtgcgggtccgtgttttctaaaagacatctgcaaaagatcctcgctgtcgcagccaggcagtgcgtgcctatcctcgcggacgagatatacggagacatggtgttctcggactgcaagtacgaacccctggccaccctgtccactgacgtcccgatcctgtcctgtggcggcctcgccaaacggtggttggtccccggatggcggctgggatggatcctgatccatgatcgccgggacattttcggaaacgaaattcgggatggactcgttaagctgtcgcaacggatcctggggccgtgcactatcgtccagggagcgctgaagtccatcctgtgccggactccaggggaattctaccacaacaccttgagcttcctcaagtcgaacgccgatctgtgctacggcgccttggctgccatcccaggacttcgacccgtgcggccgtcgggagcgatgtaccttatggtgggcattgagatggagcacttcccggaatttgagaatgacgtggaatttacggagcggctggtcgccgaacagagcgtgcactgcctgcccgccacctgtttcgagtatcctaacttcatcagggtggtcatcacggtgccggaggtgatgatgctggaagcatgttcgcgcattcaggagttctgtgaacagcattaccactgcgccgaaggatcccaagaggaatgcgacaag

SEQ ID NO: 20707 - DNA, 1362 bp, synthetic construct
  misc_feature 1..1362: note = source = /note="Description of Artificial Sequence: Synthetic coding sequence"
  source 1..1362: mol_type = other DNA
atggacccctacatgatccaaatgagctccaagggtaaccttccctcaatcctcgatgtgcacgtgaacgtaggcggacgatctagcgtccccggcaagatgaagggccggaaagcacgttggtctgtccgtcccagcgatatggctaagaagacgttcaatcctatacgagcaatagtggacaatatgaaagtgaagccaaacccaaataagaccatgatcagcctgagcatcggtgatcccactgtcttcgggaacttacccaccgaccctgaggtgacacaggcgatgaaggacgcgcttgattcgggcaagtataacgggtacgctccttcaatcggctttctgtcgtcccgggaagaaattgcttcatattaccattgcccagaggctcccctggaggccaaagatgtgatcctgacttccgggtgcagtcaggctattgatctgtgcctggccgtgctcgccaacccagggcaaaatattctcgtgcctcggccaggattttccttgtacaagacacttgccgagagcatgggcattgaggtcaaattgtacaacctgctccctgaaaaaagctgggaaatagacttgaagcagctggagtacctaattgacgagaaaacagcatgtttgatagtgaacaacccatcaaacccctgtgggtctgttttcagcaaaaggcacttgcaaaagatcctcgcagtggccgctaggcaatgtgtccccatactcgctgacgaaatatacggcgacatggtattttccgattgtaagtatgagcccctcgccaccctgagcacagacgttccaatcctaagctgcggggggctggccaaaaggtggctggttcccggatggaggttggggtggattcttatacatgaccgccgggatatttttggaaatgaaatccgcgacggtttggttaagctgagccagcgaatcctgggtccatgtactattgtccagggtgctctgaagtccatcttgtgtaggacacctggagagttttaccacaacacactgtccttcttgaagtcaaacgcagacttatgctacggggcgctagcagccattcctggcctccgcccagttaggcctagtggcgctatgtatctcatggtgggaattgaaatggagcactttccagagttcgaaaacgatgtcgagttcaccgaaagacttgttgctgagcaaagtgtacattgccttcctgcaacatgctttgagtatcctaacttcataagagttgtgataacagtgccagaggtaatgatgctggaagcttgcagccggatccaggagttttgcgagcagcactaccactgcgccgaggggtcccaggaggagtgtgataaa

SEQ ID NO: 20708 - DNA, 1362 bp, synthetic construct
  misc_feature 1..1362: note = source = /note="Description of Artificial Sequence: Synthetic coding sequence"
  source 1..1362: mol_type = other DNA
atggacccctacatgatccaaatgtcatccaagggcaaccttccctccattctcgacgtccacgttaacgtgggaggccgatcttccgtgccaggcaagatgaagggccggaaagcgagatggagtgtcaggccttctgacatggccaagaaaacattcaatccaatcagagctatagttgacaatatgaaggttaagccaaaccccaataaaacaatgatctctctgtccatcggagatcctactgttttcggtaacctccctacggaccctgaagttactcaggccatgaaggatgctcttgactctgggaagtataatggttacgcgccttcaattggttttcttagtagccgcgaggagatagctagctactaccactgtccggaggctccccttgaggctaaggacgtgatcttgacgagcggctgtagccaggctatagacctctgtctggcagtcctcgcaaatcccggacaaaatatcttggttcctagaccaggattctccctgtacaagacactggcagagtccatggggattgaggtgaagctttacaatctgttgccagagaagtcttgggaaattgacttgaaacagctggaatacctgatcgacgagaagacagcctgcctcattgtgaacaacccaagcaacccttgcggttctgttttttctaagaggcacctccagaagattctcgctgtcgccgccaggcaatgcgtgccaatcctggctgatgaaatctacggggacatggttttttcagactgtaagtatgaaccacttgcaacactctccactgacgtccctatcctttcatgtggcggtcttgctaaaagatggctggtgccaggctggaggttgggctggattcttatccatgatcgccgagacattttcggaaatgagatacgagacgggcttgtgaaactcagccagcgcatcctggggccgtgtacaatcgttcagggtgctctcaaaagcattctgtgtcgcacacccggcgagttctatcataacactctgtccttcttgaaatccaatgcggatctgtgttatggtgctctcgcagctatccccggattgagacctgtacggcccagtggtgccatgtacctgatggtcggtattgagatggagcattttccggaattcgagaacgacgttgaatttaccgagagattggtagctgaacaatctgtgcattgccttccggccacatgttttgagtatcctaactttatccgagttgtgatcaccgttccagaggtgatgatgctggaggcctgctcccgcatacaggagttttgcgagcagcattatcattgcgcagaagggagccaggaggaatgtgataag

SEQ ID NO: 20709 - DNA, 1362 bp, synthetic construct
  misc_feature 1..1362: note = source = /note="Description of Artificial Sequence: Synthetic coding sequence"
  source 1..1362: mol_type = other DNA
atggacccatatatgatccaaatgtcatctaagggaaacctgccctcaatcctcgatgtgcacgtgaacgtgggtggtcgctcttccgtgccaggcaagatgaaaggtcgtaaggccagatggagcgtgaggccttctgatatggccaagaagacatttaaccccattcgtgccatcgttgacaacatgaaggtaaagccaaacccaaacaaaacaatgatctccctgtctattggcgaccccaccgttttcggcaatttgcctacagaccctgaagtgactcaggctatgaaggatgcactcgacagtggtaagtacaatggatacgctccttccattggattcctgagctcacgcgaggaaatcgcctcctactaccactgtcccgaagcccctttggaggccaaagatgtcattctgacatccggatgctcacaagccattgacctttgccttgctgtcctggccaaccccggacagaatatactcgtccctcgtcccggtttttccttgtacaagactctggcagagtctatgggaatcgaagtcaagctctacaatttgttgcccgagaaatcttgggaaatcgaccttaagcaattggaatacttgatcgatgagaagactgcttgcctcatcgtcaataatcctagtaatccttgcggatccgtgttctctaaacgccacctgcagaagatactggccgtcgctgcccgtcagtgcgtgcccatactcgctgacgaaatctatggtgacatggttttctcagactgtaaatacgagccattggctacactgtcaactgacgtgcccatcctcagttgcggaggcctcgccaagaggtggctggtcccaggttggagactgggatggattctgattcacgaccgcagggacattttcggtaacgaaattagggacggcctggtgaagctttcccagaggattctcggtccctgcaccatagtgcaaggcgctctgaaatccatcctgtgtcgcacaccaggcgaattttatcataatacattgagtttcctcaaaagcaacgctgacctttgctacggcgccctggcagctatccccggtctgaggccagtccgtcctagcggagctatgtatcttatggttggtattgagatggaacattttcctgagttcgagaatgatgttgagttcaccgagcgcctcgtggccgagcagtcagtgcattgtcttcccgccacctgcttcgagtaccctaactttattcgtgtagttattacagtgccagaggttatgatgctggaggcatgtagccgcattcaggagttctgcgaacagcattaccactgcgccgaaggctctcaggaagagtgcgacaag

SEQ ID NO: 20710 - DNA, 1362 bp, synthetic construct
  misc_feature 1..1362: note = source = /note="Description of Artificial Sequence: Synthetic coding sequence"
  source 1..1362: mol_type = other DNA
atggacccttacatgatccagatgtcgagtaagggaaacctgccaagtatattggacgttcacgtcaacgttggcggacgaagttccgtgccaggaaaaatgaagggccgtaaggcgcggtggtcagtgcgcccatccgatatggcgaagaagacattcaatcccattcgtgcaattgtggataatatgaaagtcaagccaaaccccaataagacgatgatttcgctgtctattggcgatccaacggtatttggtaatctgccgacggaccccgaggtaacacaagccatgaaggatgcgctcgactccggaaagtacaacggctacgctccgtcgatcggcttcctctcctcccgagaggagatcgcttcctactaccactgcccagaggcccccctggaggccaaggacgtgatcctgacctccggttgctcccaggcaatagatctgtgcctagcagtgttggcgaaccctggtcagaatattctggtgcctaggcccgggttctctctatataagacgctcgccgagtctatgggcattgaggtgaagttatataacctattgccagaaaagtcgtgggagattgatcttaagcaactggagtatctcattgacgagaagaccgcctgcttgatcgtgaacaatccgagcaacccgtgcggctcagtgttcagtaagcggcacctgcaaaaaattctggctgtggctgcccgccaatgtgtgcccattctggccgacgagatatacggagacatggtgttcagtgactgtaagtatgagccgttggcaaccctctcgactgacgtgcctattctgagctgcggtggcctggcgaagcgatggctcgtaccgggttggcgcctgggttggatcctcatccatgatcgccgagatatcttcggcaatgagatcagagacggactggtgaagctgtcgcagcgcatccttggtccctgcactatcgtccagggcgcgttaaagtcgattctgtgtagaaccccaggggagttctaccacaacaccctgtcgttcctcaagagtaatgccgacctctgctatggtgccttggccgccattccgggcctgcgacccgttaggccttcgggcgctatgtacctgatggtgggtatcgaaatggagcattttccggaatttgaaaacgacgttgagttcacggagcgactcgtggccgagcagagtgtccattgtctaccagctacctgcttcgagtaccccaactttatacgagtcgtgattactgtgccagaggtgatgatgctggaggcctgcagtcgcattcaggagttctgtgaacagcattatcactgcgctgagggcagccaggaggagtgcgataaa

SEQ ID NO: 20711 - DNA, 1362 bp, synthetic construct
  misc_feature 1..1362: note = source = /note="Description of Artificial Sequence: Synthetic coding sequence"
  source 1..1362: mol_type = other DNA
atggatccatacatgatccaaatgtcttcaaagggaaacctgccatccattctggacgtgcacgtgaacgtgggcggtcgctcctcagttcctgggaagatgaaaggacgcaaggctaggtggtctgtgaggccttcagatatggctaaaaagaccttcaatcccatccgcgccattgtggataatatgaaggtcaaaccaaaccctaataaaacaatgatttccctgagcattggggacccaaccgtgtttggcaaccttcccacagacccggaggtcactcaggctatgaaagacgcactagactctggtaaatataacggttacgcgccctccataggattcttgagttcgcgagaagagatcgcgagttactatcactgtccggaggcacctcttgaggcaaaggatgttatcctaacttcagggtgttcacaggccatcgatttgtgtctggccgttcttgctaatcctggccagaatatcttggtaccacgccctggttttagtctgtacaagacattggcagaaagtatgggcatagaagtgaaactttataatttgttacccgagaaaagttgggagattgatctgaaacagctcgaatacttaattgatgagaagacggcatgtctcattgtgaataatccgtctaatccttgtgggtccgttttttccaagaggcatctacaaaaaatcttggcggtggctgctcggcagtgcgtaccaattctggccgatgagatatatggagatatggtcttcagcgattgcaaatacgaacctctggccacactttcaaccgacgtccccatattatcttgtggcggtctggctaagcggtggctggtgccagggtggaggctcggctggatactgatacacgatcggagagatatcttcgggaatgagattcgcgacggactcgtgaagctttcccagcgcatcctggggccttgtactatcgtgcaaggcgcgctgaagtccatcctgtgtcggacacctggggaattttaccacaatactctgtccttcctgaaatccaatgcagatctgtgctatggggcactggcagcaatccccgggttgcggccagtccgcccatcaggagccatgtatttgatggtgggaattgaaatggaacacttccccgagttcgagaacgacgtggagttcaccgagagactcgtcgctgagcagagtgtgcattgcctgccggctacttgcttcgagtacccgaattttatccgcgttgtgattacagtgcctgaggttatgatgctcgaagcgtgcagccgaatccaggaattttgcgaacagcattaccactgcgcggaaggcagccaggaggaatgcgataaa

SEQ ID NO: 20712 - DNA, 1362 bp, synthetic construct
  misc_feature 1..1362: note = source = /note="Description of Artificial Sequence: Synthetic coding sequence"
  source 1..1362: mol_type = other DNA
atggacccctatatgatccagatgtcttcaaaaggaaatctgccttcaatcctcgatgttcacgttaacgtggggggtcgcagctctgtgcccggtaaaatgaaagggcgtaaagcgaggtggtctgttcgaccttccgacatggccaaaaaaaccttcaacccaattcgggctattgtggacaacatgaaggtcaagcctaaccccaataagacaatgatcagtctctcaatcggcgaccccacagttttcggaaacctccctaccgaccccgaggttacgcaagcaatgaaagatgctctggattccggaaagtacaatggctacgcaccatctattggtttcctctcttctagggaggagatcgcatcttactatcattgccctgaagcccccctggaggccaaagacgtgatcctgacttcgggatgttctcaggctatcgacctgtgtcttgcagtgcttgccaatcctgggcagaacatcctcgtccccagaccggggttcagcttgtacaaaaccttagctgaatctatgggcattgaggtgaaactttataaccttttacctgagaagagttgggaaattgacctcaagcagctggagtatcttattgacgagaaaaccgcctgcctgatcgtcaacaacccatcaaatccttgcgggtccgtcttctctaaaaggcaccttcaaaagattcttgccgtcgccgcccgccaatgcgtgcctatcctcgcagatgaaatatacggagacatggtattttccgactgcaagtacgagcctttagccactctttcgactgacgtccccatcctgtcctgcggaggtcttgcaaaacggtggctggtgcccggctggcgcttggggtggatcctgatccacgaccgaagggacatctttggaaatgaaatacgtgatgggctagttaaactgtcacagagaatactgggtccttgtacaatcgtccaaggggcactgaaatccatcctgtgccgtactcccggtgagttttatcataacacccttagcttcttgaagagcaacgccgacttgtgctatggagcgctcgcagctattcccgggctccgtcctgtgaggcccagtggcgccatgtacctgatggtcggcatcgaaatggaacattttcccgaattcgaaaatgatgtcgagtttactgagcgcctggttgccgagcaaagtgtgcattgcctgccagccacctgcttcgaatacccaaattttattagggttgtgatcaccgtcccagaggtgatgatgctagaggcctgcagtaggatccaagagttctgtgagcaacactaccactgtgcagaggggtctcaggaggaatgtgacaaa

SEQ ID NO: 20713 - DNA, 1362 bp, synthetic construct
  misc_feature 1..1362: note = source = /note="Description of Artificial Sequence: Synthetic coding sequence"
  source 1..1362: mol_type = other DNA
atggacccttacatgatacaaatgtcctcgaaaggaaatctgccgagcatcctcgatgtgcatgtaaacgtgggtggccgcagcagcgtccccggcaagatgaaaggccgcaaggcgcgatggtccgtgagacccagcgatatggctaagaaaaccttcaaccccatcagagccattgttgacaacatgaaggtaaagcccaacccaaataaaactatgatcagcctcagcattggggacccaactgtgttcgggaatctgccaaccgaccccgaggtgacccaagcaatgaaggacgctctagacagtggtaagtacaacggttacgcgccctctatcggatttctgagcagtcgggaggagattgcaagttactaccactgccccgaagcacctcttgaggccaaggacgttattcttacctcaggatgtagccaagccatcgacctttgcttggccgttctcgcaaatcctggtcagaatatacttgtgcccaggccagggtttagcctgtataaaacactggctgagagtatgggcatcgaagtgaagctgtataatttgcttccagaaaagtcgtgggaaattgacttgaagcagctggaataccttattgatgagaaaactgcatgcctaattgtaaataatccgagtaatccgtgtggaagtgtgttctcaaaacggcacctgcagaaaatcctggccgtggcggcccggcagtgtgttccgatcctggctgacgagatctatggagacatggtgttttccgattgcaagtacgaacccctcgccactctgtcaactgatgtaccgattctgtcatgcggaggactcgctaaaaggtggctcgtgcccgggtggcgcctaggatggatacttatccatgatagaagagacatattcgggaacgagattagggatgggctcgtgaaattgtctcagaggatcctgggcccttgcaccatcgtgcaaggggcactcaaatcgatcctgtgccgcactccaggggaattttaccataacaccctgagttttctgaagtcaaatgcggatctatgctacggtgctctggccgcaatccccggtcttcgccccgtgcgtccttccggcgctatgtatttaatggtgggcatcgagatggaacacttccccgaattcgagaacgatgttgaatttactgaacgactggtggcagagcagtcggtgcactgccttcccgctacctgcttcgagtacccaaacttcattcgcgtggtgatcactgtgccggaagtgatgatgctagaggcctgtagccggatccaggaattttgtgaacagcactatcactgtgcagaaggcagccaagaggagtgtgacaag

SEQ ID NO: 20714 - DNA, 1362 bp, synthetic construct
  misc_feature 1..1362: note = source = /note="Description of Artificial Sequence: Synthetic coding sequence"
  source 1..1362: mol_type = other DNA
atggacccctacatgatacaaatgagtagcaaggggaatctccccagtatcttggatgtgcacgtaaatgttgggggtaggagttccgtacccgggaaaatgaaaggccggaaagctagatggagcgtgcgtccctcagacatggccaaaaagacctttaaccccattcgggcaattgttgacaatatgaaggtcaaacccaacccaaacaaaaccatgatctctctgtccattggagatcctaccgtattcggcaaccttcctacggatcccgaggtgacccaagccatgaaagatgctttagacagtggtaagtataacgggtatgctccttccatcggctttctgagttcacgggaggagatcgcttcgtactatcattgcccagaggcacctctggaagccaaagacgtgatcttgacctccggatgctcccaggccatcgacttgtgccttgccgtgctggcaaatccagggcaaaatatactggtgccccggcctggcttcagcctttacaaaaccctggccgaaagcatgggcatagaagtgaagctctacaaccttctgccagaaaagtcttgggaaatagatttgaagcagctggagtatctcattgacgagaagacagcttgtttgatagtcaacaatccatctaatccgtgcggatctgtgttctcaaagcggcatctgcagaagatcctggcagtggcagcaaggcagtgcgtgcccattctggctgatgagatttatggggatatggttttctctgattgcaaatatgaacccctcgccacgctgagcacagatgtgcccattctctcatgtgggggactggcgaagcgctggttggtgcccggatggcgtttggggtggatacttatccatgatcggcgagacatcttcggcaatgagatccgtgatgggctcgtcaagctgagccagcggattctaggaccctgcactattgtgcaaggcgctctgaaatcaatcctgtgtcgcactcctggagaattttaccacaacacactctcattcctgaaaagtaatgcggatctgtgctacggggccttagcagccatccccggactccgcccagtccggccaagcggggcaatgtatttgatggttggaatagagatggagcactttcccgaatttgaaaatgacgtcgagtttacggagcggctggtcgccgaacaatctgtgcactgtttgccggccacgtgcttcgaatatcccaattttatcagagtggtgattactgtgcccgaggtgatgatgctggaggcgtgtagccggatccaggagttttgtgaacagcactatcactgtgcagaggggagccaggaagaatgcgacaag

SEQ ID NO: 20715 - DNA, 1362 bp, synthetic construct
  misc_feature 1..1362: note = source = /note="Description of Artificial Sequence: Synthetic coding sequence"
  source 1..1362: mol_type = other DNA
atggatccttacatgattcaaatgtcttcaaagggaaacctgccatctatcttagacgtgcatgtcaatgtcggaggacggagtagcgtgcctggcaagatgaaaggtaggaaggcacgctggtcggtgaggccatccgacatggcgaagaagactttcaacccaatccgagcgatcgttgataacatgaaagtgaaacctaaccctaacaaaaccatgatctccctatccatcggagaccctactgtgttcgggaatctgcctaccgaccctgaggttacacaggcaatgaaagatgcactagactctggcaaatacaatggctatgctcctagtatcggtttcctgtcttctagagaagaaatcgcaagctactaccactgtccggaggctcccctcgaggcaaaagatgtgatcctgacaagcgggtgcagtcaggcaatcgatctgtgtctggccgtgctggcaaacccagggcagaacatactcgtgccacgcccaggcttcagtctgtataagaccttggcggaatctatgggcatcgaggtgaaattgtataatctgctgcctgagaagagttgggagatcgatctgaaacagttggagtatctcatcgatgagaagacagcatgcctgatagttaataatccatctaacccttgtggcagcgtgttctccaaacggcacctgcagaagatcctggccgtcgcagcgagacagtgcgtacctatcctggccgacgagatttatggcgatatggtgttcagcgattgcaaatatgaacccttagccacactgagtacagacgtgccgatcctgtcatgcggggggctcgcaaagcgttggctggtgcccggttggcgcctggggtggattcttatccacgaccggcgggacatattcggtaatgagataagagacggtctggttaagctcagccagcgcatcctgggtccctgcacaattgtacaaggcgccctcaagtccattctgtgcaggacaccaggagagttctaccacaacactctaagcttcctaaaatcaaatgccgatctttgctacggcgctctagctgcgatacccggactgcgcccagtcagacctagcggcgctatgtatctcatggtcggaatagaaatggagcacttcccagaatttgaaaacgacgtcgaatttacggagagactcgtcgccgagcagtcagtgcattgcctgcctgccacctgtttcgaatacccgaatttcattagggtcgtgattacagtaccagaagtcatgatgctcgaagcctgctcccgcatccaggagttttgcgaacagcactatcattgcgctgaaggttcacaggaggagtgcgacaag

SEQ ID NO: 20716 - DNA, 1362 bp, synthetic construct
  misc_feature 1..1362: note = source = /note="Description of Artificial Sequence: Synthetic coding sequence"
  source 1..1362: mol_type = other DNA
atggacccatatatgatccaaatgtcaagcaaagggaatcttccgtctattctcgatgtgcacgtaaatgtcgggggcaggtcgagcgtgcctggcaagatgaaaggacgcaaggctagatggtccgtgcggccctcagatatggcgaagaagacctttaatcccatcagggcgattgtggacaatatgaaagtgaaacctaatccaaacaagactatgatttccctctcgattggagatccaaccgtgttcgggaacctgccaactgaccccgaggtaactcaggcaatgaaggacgccctggatagtgggaagtacaatggctacgccccctccattgggtttctttcctccagagaagagatcgcttcctattaccactgccctgaggcccctctggaagctaaggatgtaattctaacatccggctgttcccaggccattgacctgtgcctcgctgtgttagccaaccctggtcagaatatactcgtgcccaggccagggttctccctctacaaaaccctggccgagtctatgggtatagaggtcaagctttacaacttactaccagaaaaatcttgggagattgatctgaagcagctagagtacttgatagatgagaagaccgcctgcttgatcgtaaacaaccccagcaatccctgtggatctgttttcagcaagcgccacctgcagaagattttggctgttgctgcacggcagtgtgtgcctatactggctgatgagatttatggcgatatggtgttcagcgattgcaagtatgagcccttagctactttaagtacggatgtaccgatcctctcatgcggcggcctcgccaagagatggcttgtgcctgggtggcggttgggttggatactcattcatgaccgcagagacatcttcggcaatgaaattcgggacggtttagttaagctctctcagcggatcttgggaccttgtaccatcgtccagggggccctgaagagtatcctgtgccgcacacccggtgagttctatcacaacactctttccttcctcaaatctaatgctgatctttgttacggggctctggccgctattccgggccttcggccagttcgaccgagcggtgccatgtatctaatggtcggaatcgagatggagcactttcctgaatttgaaaacgatgtcgaattcactgagaggctcgtcgccgaacagagtgttcattgtttgcctgcaacctgtttcgagtaccccaacttcatcagggtggtgatcaccgttcccgaagtcatgatgcttgaggcctgctcgcgtattcaggaattctgcgagcagcactaccactgtgccgagggtagtcaggaagagtgcgataag

SEQ ID NO: 20717 - DNA, 1362 bp, synthetic construct
  misc_feature 1..1362: note = source = /note="Description of Artificial Sequence: Synthetic coding sequence"
  source 1..1362: mol_type = other DNA
atggatccatatatgattcagatgagttccaaggggaatctaccttctatcctggacgttcatgtgaacgtcggcgggagaagtagtgttccaggaaagatgaagggccgcaaagcccggtggtcggtaaggcccagcgatatggctaagaagacattcaacccgattcgtgccattgtcgacaacatgaaggtgaagcccaaccccaacaagacaatgatctccctgtctataggtgatccaaccgtttttggtaacctacccactgatcctgaggtgactcaggccatgaaggacgctctggactcaggaaaatacaacggatacgccccctctatcgggtttctgtcgagtagggaggaaatagcctcatactatcactgtcccgaagcccccctggaagccaaagacgtgatcctcacttctgggtgcagtcaggcaattgacctgtgcctggcagtgctggccaatcccggacagaacatcctggtgcctcgtccagggttcagcctttataagacacttgccgaaagtatgggaatagaagttaagctctacaacttgctgcctgagaaaagctgggagatcgacctgaaacagctcgagtaccttatcgacgagaagactgcctgccttatcgttaacaacccatctaacccatgcgggtctgtgttcagcaagagacacctccagaagatcctcgccgttgctgctcgccagtgtgttcctatcctcgccgatgagatctacggggacatggtttttagcgactgtaagtatgagcccctcgccactttatccacagatgtcccaatactgagctgcggcggattggctaagcggtggctggtccctggatggcgactcgggtggatcctgattcatgaccgcagggatatattcggtaacgagattagggacggtctggtcaaattgtcacagcggatccttgggccctgtacgatcgttcagggggctcttaaatccatactctgcagaacacctggagagttctatcataacaccttatcgttcctcaagtcaaatgccgacctatgctatggtgcgctggcagccatcccgggactcaggccggttcggccctctggagcaatgtatctcatggtcgggatcgagatggagcatttcccagagtttgaaaatgacgtggaatttaccgagcggctggtggccgagcagtcagtccactgcttgcctgccacttgttttgagtaccctaatttcatcagagtggtgatcactgtacctgaggtgatgatgctcgaagcctgctcccgcattcaggaattctgtgagcagcactatcactgtgccgagggtagccaagaagaatgcgataaa

SEQ ID NO: 20718 - DNA, 1362 bp, synthetic construct
  misc_feature 1..1362: note = source = /note="Description of Artificial Sequence: Synthetic coding sequence"
  source 1..1362: mol_type = other DNA
atggacccctacatgatacagatgagctccaaaggaaatctgccatcaatcctggatgtgcacgtgaacgtaggcggacggtccagcgtgccagggaaaatgaaaggcaggaaggcaaggtggagcgtccgcccgtccgatatggctaagaaaacgtttaacccaataagagctattgtggataacatgaaagtcaagcccaatccaaacaagacaatgatatccctgtccatcggggaccccactgttttcggcaacctacctactgaccctgaagtgacacaggctatgaaagacgcccttgactcaggcaagtataacggttacgcccctagtatcggcttcctctcgagtcgagaggagatcgcttcctattaccactgcccagaagcccctctggaggctaaggatgtgattttaacgtccggctgctcgcaggcaattgacctgtgcctcgcagtgttggcgaacccgggacagaacattctggtaccaaggcctggcttttcattatacaagactctcgccgaatcaatgggaatagaagtgaagctgtacaacctccttcccgagaagtcctgggagatcgacctgaaacagctggagtacctgatcgatgagaagacggcttgccttattgttaataacccctccaacccctgtggttctgtgttctccaagcgacatctgcagaagatcctggccgtggcggccaggcagtgtgtgccaatccttgctgacgagatctacggggacatggtgttctccgactgcaagtacgagcccctggcgaccctttccacggacgtccccattctttcctgtggcggcctcgccaaaagatggctcgtacccggctggcggctgggatggattctcatacacgatcgaagagacattttcggaaatgaaatcagagacggcttagtgaaactcagtcagcgtatcctcggtccctgcacgatcgttcagggtgctctcaagagcatactgtgccgcacacccggtgaattctaccacaatacactatccttcttgaaaagcaacgcagatctgtgctacggagccctagccgccattcccggccttcgacctgtgagacctagcggcgccatgtatcttatggtcggaatagagatggagcatttccccgaatttgaaaatgacgtcgagtttacagagcggctcgtggctgagcagtcagtgcactgcctgccggcgacatgctttgagtatcccaatttcatcagagtcgtgattaccgtacctgaggtcatgatgctggaagcttgttcgcgcattcaagagttttgtgaacagcactatcactgtgccgaaggatcccaggaagaatgtgacaaa

SEQ ID NO: 20719 - DNA, 1362 bp, synthetic construct
  misc_feature 1..1362: note = source = /note="Description of Artificial Sequence: Synthetic coding sequence"
  source 1..1362: mol_type = other DNA
atggatccctacatgattcagatgagcagtaagggaaatcttccctctatcctggatgtgcatgtcaacgtgggcgggcggtcctctgtccccggaaagatgaagggtcgcaaggctaggtggagcgtgcgcccatctgatatggccaaaaagacgttcaatcctattagagcaatcgtggataacatgaaagttaaaccaaatccaaataagacaatgatctccttatcgattggagatccgacggtttttggcaacctgcccaccgatcctgaggtcacccaggcgatgaaagacgctttggacagcggaaagtataacggatacgcgccctctatcggattcctaagcagtcgggaggagatagcctcctactatcactgccctgaagcgccactcgaggcaaaggacgtgatcttgacatctggatgctcccaggcgattgacctgtgcctcgccgtattagccaatcccggacagaacatcctggtgccacggcctggtttctctctgtataagactcttgcagaaagtatggggatagaggtaaaactctacaaccttttacccgagaaatcatgggaaattgatctcaagcagcttgagtacttgatagacgagaagacggcatgcctgatagtgaacaatccttctaacccctgcgggtcggtgttcagtaaacgccaccttcaaaaaattctggccgtggcagctaggcagtgtgtgcctatattggctgacgaaatctatggggacatggttttctctgactgcaaatatgaacctctagctacactgagcacagacgtccctattttaagttgtggcggcctggccaagcgctggctagttcctggatggcgcctaggctggatcctcatacacgataggagggatatttttggcaacgagattcgggacggtctggtgaagctttcccagcgtatcctgggcccttgtacaatagtgcagggagccttgaaaagcattctgtgtaggaccccaggagagttttatcataatacactgagcttcctcaagtccaacgcagatctctgttacggagcacttgcggccatcccaggactccgaccagttaggccaagtggcgcaatgtaccttatggtaggcatcgaaatggagcattttcccgagttcgagaatgatgtggaatttaccgagcggctcgttgccgagcaaagcgtgcactgtttgccagcaacatgctttgagtacccaaattttatccgcgtggtcattacagtgcctgaagtgatgatgctcgaggcttgttctagaatccaggaattttgcgagcagcactaccattgtgccgagggttcccaggaagaatgtgacaag

SEQ ID NO: 20720 - DNA, 1362 bp, synthetic construct
  misc_feature 1..1362: note = source = /note="Description of Artificial Sequence: Synthetic coding sequence"
  source 1..1362: mol_type = other DNA
atggacccctatatgatccagatgtcttcgaaggggaatttaccgtctatcttggacgtgcacgttaatgttggtgggaggtcgtccgtgccagggaagatgaaaggtcgcaaagccaggtggtccgtgcgcccttctgatatggcgaagaaaacctttaaccctataagggcgatcgtcgataatatgaaggtaaagcccaatcccaataagactatgatcagcctgagtatcggagacccgactgttttcgggaacttacctaccgatcccgaggtgactcaggccatgaaggatgcgctcgacagcgggaagtacaatgggtacgcccccagtattggcttccttagtagccgtgaggagatagcgagctactatcattgtcctgaagcccccttggaagccaaggatgtcattctgacgagtgggtgttctcaggctatagacctgtgccttgcggtccttgccaaccccgggcaaaatattcttgtgcctcgcccaggtttctccctgtataagacacttgcagaatccatgggcattgaggttaagctgtacaatctgttgcctgaaaaatcttgggagatcgatctgaaacagctggaatatcttattgacgaaaagacggcatgcctcatcgtgaataatccatccaacccttgtggcagtgtgtttagtaagcgtcacctgcagaagattctcgcagtggcagctcgccaatgcgtgcccattctggccgacgaaatctatggtgatatggttttttccgattgtaaatatgagccacttgcgacactttccacagatgtgcccatcctatcctgcggcggacttgccaagcggtggctggtacccggatggcgtctgggctggattttgattcatgacaggcgggacatattcggcaatgagatacgtgacggcctcgtgaagctttctcagagaatcctgggtccctgtacaattgtgcaaggggcccttaagagtatcctttgccggacgcccggtgagttttaccataacaccttatcttttttaaaatccaacgctgacctatgctacggcgcattggccgcaatcccaggcttgcgccctgttaggccatccggggcaatgtacttaatggtcggtatcgagatggagcatttccccgagttcgagaatgacgtggagtttacagaacgtctggtagcagagcagagtgtccattgtcttccggctacttgcttcgaatacccgaatttcatccgagttgtcataacagtgccagaggtcatgatgctggaggcctgcagtcggattcaggaattctgtgagcagcattaccactgtgcagaaggcagtcaggaagaatgcgacaaa

SEQ ID NO: 20721 - DNA, 1362 bp, synthetic construct
  misc_feature 1..1362: note = source = /note="Description of Artificial Sequence: Synthetic coding sequence"
  source 1..1362: mol_type = other DNA
atggatccttatatgatccagatgtctagtaaagggaacttaccaagcatactggatgtccacgttaacgtagggggccggtctagcgtgcccgggaagatgaaaggcagaaaggcccgctggtctgtgcggccaagtgacatggccaagaagacattcaacccaatcagggccatcgtggataatatgaaagtcaagcctaaccctaacaagactatgatatctctctctatcggggaccctaccgtgttcggcaacctacctaccgatcctgaagtgactcaggcaatgaaggacgccctggacagcggtaagtacaatggctatgcaccctcaattggattcctatctagtagagaggagatagcatcctactaccactgccctgaagccccactagaggctaaggacgtgatcctcacttctggctgttcccaggctattgacctgtgcttagccgtccttgccaaccccggacagaacatactggttcccagacctggattctctctttacaagaccctggctgagtctatggggatagaggtgaagttgtacaatctgctgcctgagaagtcatgggaaatagatttaaagcaactagagtacctaattgatgagaaaaccgcatgtctgattgtgaacaatccttcaaacccttgtggctccgtcttttctaaacggcacctccagaagatcctcgccgttgcagctcggcagtgcgtgccaattctggcagacgagatttacggtgatatggtgttttctgactgcaagtatgaacctcttgctaccctgagcacagatgtccccattctgtcctgtggcgggctcgcaaagaggtggcttgtgcctggttggcgactgggctggatcctcatccacgacaggcgggatatctttggaaacgagattcgggatgggttagtgaagctctcccaaagaatcctaggcccatgcactatagttcagggcgccctgaaaagtattttatgtcgcactcctggcgagttctatcacaatactctaagtttcctgaagagcaatgctgatctctgctacggagccttggctgccattccagggctcagacccgtccgcccttctggagctatgtatctgatggtcgggatcgaaatggaacactttcccgagtttgagaacgacgtggagtttacagaaaggctggtggccgagcagagtgttcattgcttgcctgctacctgcttcgaatatccaaatttcatacgtgtggtcattacagtgccagaggtgatgatgctggaagcatgctctcgcattcaagagttctgtgaacagcactaccactgcgctgaagggtctcaagaggaatgtgacaag

SEQ ID NO: 20722 - DNA, 1362 bp, synthetic construct
  misc_feature 1..1362: note = source = /note="Description of Artificial Sequence: Synthetic coding sequence"
  source 1..1362: mol_type = other DNA
atggatccatacatgatccagatgtcttctaagggcaaccttccctccatcctcgacgtgcatgttaatgtgggaggccggagctcagtcccagggaaaatgaagggccgcaaggcccggtggtctgtcagacctagcgatatggctaaaaagaccttcaatccgatacgcgccattgtcgacaatatgaaggtgaagcccaacccaaacaaaactatgatcagtctgagcatcggcgacccaaccgtgttcggcaacttgccaacggatcctgaagtgacccaagccatgaaagacgctctggactctgggaaatacaacgggtacgctccatcaatcggcttcctttcatcccgagaggaaatagccagttactatcactgccccgaggcacccctggaggcaaaggatgtcatcctcacatctgggtgtagccaggctattgatctctgcttggccgttttggccaacccggggcagaacattctggtgccacgtcccgggttttcactatacaagaccttggccgagagcatggggattgaggttaaactctataacctgctccctgagaagtcttgggagattgatttgaaacagctggagtacctgatagatgagaaaactgcttgcctcatcgtgaacaatccatccaacccttgtggcagtgtgttttcaaaacggcatcttcaaaagatcctggccgtcgccgcccggcaatgcgtgcctatcctggctgacgagatatatggagatatggtgttcagcgactgcaagtacgagcccctagccaccctttccaccgatgtgccaattctcagttgcggaggtctcgccaagcggtggctggtgcccgggtggcggctgggctggattctgatacatgatagacgggacatcttcgggaacgagattcgcgacggcctggtcaaactgtcccagcgaatccttgggccatgcactatcgtacagggagccctcaaatccatactgtgtaggacccctggcgagttctaccataataccctgtccttccttaaatccaacgccgacttgtgctatggagccttggccgcaatacctggcctcaggccagttcgacccagtggcgctatgtatctcatggtgggcatcgagatggagcatttcccggagtttgaaaatgatgtggaattcacagagaggctcgtggccgagcagtctgtgcattgcctacccgcgacttgctttgagtatcctaactttatcagagtcgtgataaccgtgcccgaggtaatgatgctggaggcttgttctagaattcaggaattctgcgaacagcactatcattgtgccgagggcagtcaagaagaatgcgataag

SEQ ID NO: 20723 - DNA, 1362 bp, synthetic construct
  misc_feature 1..1362: note = source = /note="Description of Artificial Sequence: Synthetic coding sequence"
  source 1..1362: mol_type = other DNA
atggacccgtacatgatccaaatgagctcgaagggcaatctcccaagtatcttggatgttcatgtgaacgtaggcggcagatcctccgtgccgggcaaaatgaaggggcggaaggcacggtggagtgtgcgcccgagcgacatggcaaagaaaactttcaatccaatcagagccatcgtggataacatgaaggtgaaacctaacccaaataaaacaatgattagtttaagtatcggggatcctacagtcttcgggaatctgccgaccgatcctgaagtgacccaagccatgaaagatgcactcgactcaggcaaatacaatggctatgccccctcaataggttttctcagcagcagggaggagatcgccagctattaccattgcccggaggctcctctggaagccaaagacgtgattctgacatctggctgttcacaagcaatcgacctgtgcttggcggttctggcaaacccaggccagaacattttggtgcccaggccgggcttttcactctataagacattggccgagagtatgggtatcgaggtcaaactttacaatctgcttcctgaaaaaagttgggagatcgacctcaagcagctcgagtacctgattgacgaaaaaactgcctgccttattgttaataacccatccaatccatgcggctcagtgttctcgaagagacacctccaaaagattttagcggttgcagctcgccagtgcgtaccaatcttagcagacgaaatctatggcgacatggtgttttccgactgtaagtatgagccactagcaacccttagtactgatgtgccaattctgagctgtggtggattggctaagcgctggctcgtgcctggttggcgtctggggtggatcctcatccacgacaggcgtgatattttcggaaatgagattcgcgatggcctggtgaaactgagtcagaggatcctcggcccttgtaccatagtgcagggagctctgaagtcgatactctgtagaacaccaggcgagttctaccataatacgctatcatttttgaaaagcaatgcagatctgtgttatggtgcgttggcggcgattcccggtctaagacccgtccggccatccggggccatgtatctcatggtggggattgagatggagcatttccctgaattcgaaaatgacgtcgagtttacagagcggctcgtggctgaacaatccgttcattgtttacccgcgacctgttttgagtatcccaattttatccgagtagtgattactgtgcctgaagttatgatgctggaagcttgcagtcggatacaggagttctgcgagcagcactatcactgtgcagagggttcacaggaagaatgcgataag

SEQ ID NO: 20724 - DNA, 1362 bp, synthetic construct
  misc_feature 1..1362: note = source = /note="Description of Artificial Sequence: Synthetic coding sequence"
  source 1..1362: mol_type = other DNA
atggatccttatatgatccagatgtcctccaaaggaaatttgccttccatactcgatgtgcatgtgaacgtgggggggaggtctagtgtgcccgggaaaatgaagggacgaaaagccaggtggagtgtgagaccttctgacatggctaaaaaaacattcaatcccatacgcgcaattgtcgataacatgaaagtgaaacctaaccctaataaaactatgatttcactctcaataggggatccgactgtattcggaaaccttcccacagatccagaagtaacacaggctatgaaagatgccctggattcagggaaatataatggatatgcgccctctataggattcctcagttcacgcgaggagatcgccagttactatcattgtcctgaggctccactggaagccaaagatgtgatactcacatccggatgttctcaggccattgatctgtgcctagccgtccttgccaacccagggcagaatatactggtccctcgcccaggattctccctctataaaacactggccgaatctatgggaatcgaagtcaaactctacaacctgttacctgagaaatcttgggaaatcgatctaaaacagctggaatacttgatcgatgaaaaaacagcctgccttatagtgaataacccctcaaatccatgtgggtctgttttctcaaagagacacctgcagaaaatactcgctgtggctgctaggcagtgtgtccctatattggctgacgaaatatacggggatatggtgttttccgattgtaaatatgaacccctcgcaacgctctctacagatgtccctattttatcctgtgggggattagccaaacggtggcttgtgcccggatggaggcttggatggatcttaatacatgatcggcgggatatctttggaaacgaaattcgagatgggctcgtgaaactgtcacagcggattctcggaccatgcacaatcgtgcaaggggccctcaagagtatcctttgtaggacaccaggagaattctatcacaacactttgtcctttctaaaatctaacgctgatctttgctatggagcactcgctgccatacctgggttacggccagtgaggccaagtggagctatgtatctcatggttgggatcgaaatggaacactttcccgaatttgaaaatgacgtggaattcactgaacgattagtagccgaacagtcagtgcattgtttacccgcaacttgctttgaataccctaactttattagggtggtgatcactgtccctgaagtaatgatgctcgaagcatgctctaggatacaggagttttgtgagcagcactatcattgtgctgaagggtcacaggaggaatgtgataaa

SEQ ID NO: 20725 - DNA, 1362 bp, synthetic construct
  misc_feature 1..1362: note = source = /note="Description of Artificial Sequence: Synthetic coding sequence"
  source 1..1362: mol_type = other DNA
atggatccatacatgattcagatgagctcaaagggcaacttaccatcaattctcgacgttcacgtaaatgtgggcggtcgaagttccgtgcccggaaaaatgaaagggaggaaagcgcgctggtccgttcgcccctcagacatggctaaaaagactttcaaccccatacgcgcaattgtagataacatgaaggtgaagcctaatccaaacaagactatgatctccttgtcaataggcgatcctactgtgtttgggaatctgcctaccgatccagaggtaactcaagccatgaaggatgcccttgactccggaaaatacaacggctacgcacctagcattggattcttgtcgtcccgggaggaaattgccagctactaccattgccccgaagcaccactggaggccaaagacgtgattctcacctctggatgttcccaggccatcgatctgtgtctcgccgtgctggctaatcctggccagaacatcctggtgccgcgcccggggtttagtctctataaaacacttgcggaaagcatgggaattgaggtcaagctctacaatctcctccctgagaagtcctgggagattgacttgaaacagttggagtacttgattgatgaaaagaccgcgtgcttgatcgtgaacaacccaagcaatccttgtggcagcgtattttcaaaaaggcacctccagaaaattctggcggtcgcagctcgacagtgcgtgccaatcttagcagacgagatctacggcgacatggtgtttagcgattgtaaatatgagcctctggcgaccctgagtaccgacgttccgattctgtcctgcggcggcctggccaagcgctggctggtccctgggtggagacttggctggatcctgattcacgaccgcagggatattttcgggaacgagatccgtgatggtcttgtgaaactatctcagcggatcttgggcccctgcacaattgtacagggcgcactaaagagcatcctctgccggaccccaggtgagttttatcacaataccctgtccttccttaaatcgaacgctgatctgtgttacggcgcccttgccgccattcccggactgaggcccgttcggccctccggcgccatgtatctcatggtcggaatcgagatggaacacttcccagagttcgaaaacgacgtggaatttaccgaaaggctggtcgccgagcagtccgtgcactgcctgcctgcgacttgcttcgaatatcctaactttatacgagttgtgatcaccgtgccagaggtgatgatgttagaggcctgctcaaggattcaggagttttgcgaacagcattatcattgcgcagagggcagtcaggaggaatgtgacaaa

SEQ ID NO: 20726 - DNA, 1362 bp, synthetic construct
  misc_feature 1..1362: note = source = /note="Description of Artificial Sequence: Synthetic coding sequence"
  source 1..1362: mol_type = other DNA
atggatccgtatatgattcagatgtcgtccaaggggaatcttcctagcattctggatgtgcatgttaatgtcggcggacgatccagcgtgccgggcaagatgaaggggcgtaaggcccggtggtccgtccgacctagtgacatggccaagaagacattcaatcccatccgagcgattgttgataacatgaaggttaagccaaacccgaacaagacgatgattagcctcagcataggggatccaaccgtcttcgggaacctccccacagaccccgaggtcacacaagctatgaaagatgcacttgactccgggaagtacaatgggtatgctccgtcgatcggcttcctcagttctcgcgaggagattgctagttactatcattgcccagaagcgcctctcgaagccaaggatgttatcttgacctctggatgcagtcaagctattgatctttgcttggcagtcctcgccaacccaggtcaaaatattctcgtcccacgtcctggttttagcctctacaagaccctagcggaatcaatgggaatagaggtgaagctttataatttgctccccgaaaagtcctgggagatcgaccttaaacagttggagtatcttatagacgagaaaaccgcatgtctaattgtgaacaacccgtctaacccgtgcgggtcagttttctcgaagcgccatctgcagaagatcctggctgtcgctgctagacagtgtgtgcccatcttagccgacgagatatatggtgacatggtcttctctgactgcaaatacgaaccactcgctaccctttccacagacgtccccattttgtcttgtggtggtcttgccaagcgttggcttgtccccggttggcgtcttggttggatcctcatccatgaccgcagggatatattcggtaacgagattcgtgatggcctcgtaaagctctctcagcgtatcctcggcccgtgcacaatagttcaaggagctctaaagtctatcctgtgtaggaccccaggagaattctaccacaacacattgtctttcctgaagtccaatgctgatttatgctatggggctctcgccgcgatccctggactcaggcccgtcaggcctagcggtgctatgtatctaatggttggtattgaaatggagcattttccggagttcgagaatgatgttgaattcacggaacgtctcgtggccgagcagtccgtgcattgcctccccgctacttgctttgaatatccgaactttatccgtgttgttatcacagtcccagaggtcatgatgctggaggcgtgctcaagaatccaggagttttgtgagcagcactaccactgtgcggagggttctcaagaggagtgtgacaag

SEQ ID NO: 20727 - DNA, 1362 bp, synthetic construct
  misc_feature 1..1362: note = source = /note="Description of Artificial Sequence: Synthetic coding sequence"
  source 1..1362: mol_type = other DNA
atggatccctatatgatccaaatgtcttctaaggggaatctcccatcaatcttggacgttcacgtgaatgttggtgggcgctccagcgtccccggaaagatgaaaggacgtaaggccagatggagcgtgcgtcccagtgatatggcaaagaaaacatttaaccctattagagcaatcgtggataatatgaaagtgaagccaaatcctaacaaaaccatgatatccttatcaatcggcgaccccacggtgttcggcaatctccctaccgatcccgaagtcacgcaagctatgaaggatgcccttgactctggtaaatacaacggatacgctcctagtattggcttcctttcatctcgtgaggaaatcgcgagttactatcattgcccagaggctcctctggaagccaaagacgtgatcctgacgtctggttgcagtcaagctattgatctgtgcctggccgtactggccaaccccggccagaatatcctggtaccccgacctggcttttccctgtataagacattagccgagtctatgggaatcgaagtgaaattgtacaaccttctgcctgaaaagagttgggaaatcgaccttaagcagttagagtatctgatcgatgagaaaactgcatgtcttatcgtcaataatccatctaacccgtgcgggtcagttttctccaagcgccatctccagaagattctggcagtggctgccaggcagtgcgtgcctattctggctgatgaaatttatggagatatggttttttcagattgcaaatatgaaccccttgccacactgagtaccgacgtccccattctgtcgtgcggaggcttagcaaagaggtggctggtcccaggttggcgtctagggtggatcctgattcacgatcggcgtgacatcttcgggaatgaaataagggatgggctcgtcaagcttagtcagcggatcttggggccttgcaccatcgtgcagggggccctgaaaagtattctctgcaggacgccaggcgagttctaccacaatacgctctctttcctcaagagcaatgccgacctgtgctacggcgccttggcagccatccctggcctcagacccgtacggccctctggggcaatgtatctgatggtgggcatcgagatggagcatttcccggagtttgaaaatgacgtggagttcactgaacggctggttgctgagcagagcgtgcattgcttgccagcaacatgcttcgaatacccgaactttatcagggtagtgatcacagtgccagaggtcatgatgctggaggcgtgctcccgaattcaggagttttgtgagcagcactatcactgtgccgaggggtcccaagaggagtgtgataaa

SEQ ID NO: 20728 - DNA, 1362 bp, synthetic construct
  misc_feature 1..1362: note = source = /note="Description of Artificial Sequence: Synthetic coding sequence"
  source 1..1362: mol_type = other DNA
atggatccttatatgatccagatgagtagtaaagggaacctgccgtctatactggatgttcatgttaatgttggcgggagatcaagtgtcccaggcaaaatgaagggccgaaaagcaaggtggtcagttcgaccctccgacatggccaagaagacttttaaccctataagagccattgtcgacaacatgaaggtgaagccaaaccctaacaagaccatgatctctctgtctatcggtgaccctacagtctttgggaacctacccactgacccggaagtgacgcaggctatgaaggatgccctggactctgggaagtacaatggctacgctcccagtataggtttcctgtcgtccagggaagaaatcgcctcttattaccactgtcccgaagcccctctggaggcaaaagacgtgatcctgacttctggctgttcccaggccattgatctgtgtctggccgtcctggccaaccctggacagaatatccttgtgcctagacccggattctccttgtacaaaacattagccgagtccatggggatcgaagttaaactttataacctcctgcccgagaagagctgggaaattgatctcaagcagctggagtatcttatagacgagaagaccgcgtgccttatcgttaacaatccctcaaacccttgtggatcggtattctctaaacgccatttgcagaaaattctggctgtggccgctcgccagtgcgtgcccattctagcagacgagatttatggcgatatggttttctccgactgtaagtacgaacccctcgctacattgtcgactgacgtgcccatactgtcctgtggcgggttagctaaaaggtggctggtgcccgggtggaggctgggatggatacttatccacgataggcgcgatatttttggcaatgagattcgagacgggctcgtaaagttgtcccagaggatcctcggtccatgcaccatcgtccagggtgccctcaagagtatactctgtagaactcccggcgaattctaccacaacaccctctcgtttctcaaaagcaacgcggacctttgttatggggccttagcagctatccctggcctgagaccagttagacctagcggagctatgtatttgatggtgggcatcgagatggagcacttccccgaattcgaaaacgacgtggagtttacggaaagacttgtggccgagcagtctgtccactgtctccccgccacttgctttgagtatcctaatttcatcagagtcgttattacggtcccagaggtgatgatgctggaagcctgtagcaggattcaagaattttgcgagcagcattaccattgcgccgaaggaagccaggaagagtgcgataag

SEQ ID NO: 20729 - DNA, 1362 bp, synthetic construct
  misc_feature 1..1362: note = source = /note="Description of Artificial Sequence: Synthetic coding sequence"
  source 1..1362: mol_type = other DNA
atggacccctatatgatccaaatgtctagcaaaggcaatctgccgtcaatccttgacgtgcatgtcaatgttgggggtcgttcctcagtcccgggtaagatgaaggggagaaaggctcgttggtctgtgcggccgagcgacatggcgaaaaaaactttcaatccgattcgagcaattgtggacaatatgaaagttaagccaaatcctaataaaacaatgatttccctaagtattggcgatccgacagtatttggtaatctgccgacggatcctgaagtcacgcaagcgatgaaagatgcattggactcgggaaaatacaatggatatgccccgtctataggttttttatcttctcgtgaggaaatcgcctcatattatcactgcccggaagctcctcttgaggcgaaggatgtcatacttactagcggttgttctcaagcaatagacctgtgcttggcggtcttagccaacccggggcagaacattttagtcccgcgccctggtttttctttatataaaactcttgcggaatccatgggaattgaagtaaaactatacaatttattgcctgagaaaagctgggaaatcgatcttaaacaattggaatatctgattgacgagaagactgcttgcctcattgtaaacaaccctagtaatccgtgcggctcggtgttttctaagagacacttacaaaaaattttagctgtcgcagctagacaatgcgtgcctatcctggctgacgagatctatggagatatggtgttttccgattgcaaatatgaacctttggcgactctctcaacggatgtgccaattctaagctgtggaggccttgctaaacgatggctcgttccgggctggcgcctgggctggattctcattcatgatagaagagatattttcgggaacgaaatccgagatggcttggtgaagctttcacaaagaattcttggcccgtgtaccatagtacagggagcgctgaaatctatcctatgtcgcacgcctggagaattttaccataatacattatcctttctgaaaagcaatgcagatctttgctatggagctttagcagcaatccctggtttacgccctgttagaccctccggggcgatgtacttgatggtgggaattgagatggaacactttcccgaatttgagaatgatgttgaattcacggaacgcttagtggcggagcagtcagtgcattgcttaccggctacatgctttgagtatcctaattttatacgtgtcgttatcacggttccggaagtcatgatgttagaggcatgctcgcgtatccaagagttttgtgagcagcattatcattgtgcagagggctcacaggaagagtgcgacaag

SEQ ID NO: 20730 - DNA, 1362 bp, synthetic construct
  misc_feature 1..1362: note = source = /note="Description of Artificial Sequence: Synthetic coding sequence"
  source 1..1362: mol_type = other DNA
atggatccatatatgatccagatgtcctccaaggggaaccttcccagcatcctggatgtgcacgtaaatgtgggagggaggtctagcgtccccggcaagatgaagggccgtaaggcacggtggtctgtgagaccttccgacatggcgaagaaaacgttcaaccctatccgagccatcgttgataatatgaaagtaaagcctaatcctaacaagacaatgatttctctctccatcggagatccaacagtattcggaaatctgcctacggaccctgaagttactcaggcaatgaaggacgcactggattcaggcaagtataacgggtatgccccctctatcggattccttagctctcgcgaagaaatcgcctcctattaccattgtcctgaggcacccctggaggcaaaagatgtaatacttacatctggatgttcgcaggctatcgatttgtgcttggccgtccttgccaaccccggtcaaaatatcctggtgccccgtccagggttttcactgtataagactttggccgagagtatgggcatcgaggtgaaactgtacaatcttctgccggaaaaatcgtgggaaattgatttgaaacagctggagtacctcattgacgaaaagacagcgtgtctgatagtcaacaatcccagcaacccctgtgggtctgtgttttctaaaaggcacctgcagaagattcttgccgttgccgcccgtcaatgcgtccccatcctggccgacgagatttacggggacatggttttttctgactgcaaatatgaacctttagctacactcagcaccgatgtgccgattctatcctgtggcggcttagccaagcgctggctggtccctggctggcggctcggatggattctgatccatgacagacgggatatattcgggaatgaaataagagatggcctcgttaagctgagccagcgcatcctgggcccatgtaccatcgtgcagggcgccctgaaatcaattctgtgtaggacacctggggagttctatcacaacaccctgagtttcctgaagtctaatgcagacctgtgctacggcgctctggcggcaattccaggactgagacccgtgcggcccagcggtgccatgtaccttatggtcggcattgaaatggagcactttcccgagttcgagaatgacgtggaattcaccgaaagactggtggccgaacaatccgtgcactgcttgcccgctacatgttttgaatatcctaattttattagagtggtcattacagtgcccgaggtgatgatgctggaagcttgttccaggatccaagagttttgcgaacaacactatcactgtgccgaaggctcccaggaagaatgcgacaaa

SEQ ID NO: 20731 - DNA, 1362 bp, synthetic construct
  misc_feature 1..1362: note = source = /note="Description of Artificial Sequence: Synthetic coding sequence"
  source 1..1362: mol_type = other DNA
atggatccatatatgatccaaatgtccagcaagggcaatctgccctccatcctggacgtacacgttaacgtcggcggccgttcttcggtgccggggaaaatgaagggacggaaggccaggtggtccgtgcgcccttctgatatggccaagaagacttttaatcctattcgtgccatcgtggataatatgaaggtgaagcctaatccaaataagactatgatttccctatcaattggcgaccccaccgtcttcggtaacctgcctacagatcccgaagtgacccaggcgatgaaggacgccctcgatagcggcaagtacaacggctacgctcccagtattggctttctgagttcgagagaagagattgcttcttactaccattgcccggaggctcctcttgaggcaaaagacgtgatccttacctctgggtgctcacaggctattgacttgtgtctggctgtgctggccaatccagggcaaaacattttagtgccccgacccgggttttccctttataaaactctagctgaatcaatgggcattgaagtgaagctttataacctgctgcccgagaagagctgggagattgacctgaagcagttggagtacctgatagatgaaaaaacggcttgcctcatcgtcaacaatccctccaacccatgcgggtccgtcttcagcaaaagacacttacaaaagatcctggctgtggctgcgcgtcaatgcgtccctatccttgcagacgagatctacggcgatatggtttttagtgactgcaagtatgaaccactcgctaccctgtccacagatgtacccatcctcagctgcggagggctggcgaaaagatggttggttcctggatggaggcttggctggatcctcatccatgacagacgcgatattttcggtaacgaaatcagggacgggctcgtcaagctttctcagagaattctgggcccttgtaccatagtgcaaggggctttgaaaagtattttatgcaggacacccggcgaattctaccacaacactctgtcgtttttaaaatcgaacgcggatctttgttatggcgccctcgccgctatccccggccttcgcccagtgaggccatcaggagccatgtacctaatggtaggtattgaaatggagcacttcccagagttcgagaatgatgtggagttcaccgaaaggctggtggcggaacaaagcgtgcattgcctgcctgcgacatgtttcgaatatcctaatttcatccgggtggtaataacggtgccagaggtaatgatgttagaggcgtgctctcgcatccaggagttctgcgaacagcactatcactgtgcagagggttcccaggaggaatgtgacaaa

SEQ ID NO: 20732 - DNA, 1362 bp, synthetic construct
  misc_feature 1..1362: note = source = /note="Description of Artificial Sequence: Synthetic coding sequence"
  source 1..1362: mol_type = other DNA
atggatccttatatgattcagatgtcatctaagggcaacttgccaagcatcctggatgtccacgtcaatgtcggtggccgcagcagcgtgcccggcaagatgaagggccgcaaggctaggtggtctgtgaggccttctgacatggcaaaaaaaactttcaaccccatcagagcaatcgtagataatatgaaagtgaagcctaatcctaacaagacgatgatctctctgagtattggcgaccccactgtgttcggaaacctgccgactgatcctgaggtcacccaggccatgaaggatgccctcgactccggcaaatataacggatacgcaccctctatcggatttcttagctccagagaggagatagcatcttactaccattgtcctgaggcccctttggaggccaaagacgtcattctgacatccggctgttcccaggcgatcgacctgtgtctcgctgtgctcgctaatcccggtcagaatatcctggtccctagacccggcttcagtctgtataagaccctcgcagagtctatgggcattgaggtaaaactctataacctgctgcctgaaaagagttgggagattgatctcaagcagttggagtacctgatcgacgaaaagaccgcgtgcctcatcgttaataaccccagtaatccatgtggctccgtcttcagcaaaagacacctccagaagatacttgctgtcgctgccagacagtgtgtccctatcctggcggacgagatatacggcgacatggtgttcagcgactgcaagtacgaaccactggccacgctgagtactgatgtacccatcctttcctgcggtggcctcgccaagagatggttggtgcccggctggagactcggctggatcctcattcacgaccgccgcgatatttttggcaatgagatcagagacggccttgttaagctgtcacagaggattctcggtccttgtacaatagttcaaggagccttgaaaagcatactttgccgcacgcctggagagttctaccacaacaccctgtctttcttgaaatctaacgctgacctctgttacggagcactcgccgcaattccaggcctgaggccagtgaggccatctggcgcaatgtacttgatggttggtatcgaaatggagcattttccagagtttgagaacgatgttgaatttaccgaaaggctcgtcgccgaacaatccgtgcactgtctgccagccacttgtttcgaataccctaacttcatccgcgtcgtgatcacggtgccagaggtcatgatgcttgaagcttgctcccgcatccaggagttctgtgaacagcattaccactgtgctgaaggttcccaagaagagtgcgataaa

SEQ ID NO: 20733 - DNA, 1362 bp, synthetic construct
  misc_feature 1..1362: note = source = /note="Description of Artificial Sequence: Synthetic coding sequence"
  source 1..1362: mol_type = other DNA
atggacccatacatgatccagatgtcctccaaaggaaacctgccaagcatacttgacgtacacgtcaacgtcggaggccggtcctccgtgccaggcaagatgaagggccggaaagcccgttggtccgtgcggccttccgatatggcaaaaaagactttcaatccaattagggcaatcgtggacaatatgaaagtgaaacccaaccccaataagacgatgatttcccttagcataggcgatcccaccgtgtttgggaatctcccgaccgatcctgaagttactcaggccatgaaggatgcactggatagtggaaaatataacggttacgccccctctattggcttcctgtcctcgagagaagagatagcatcttactaccactgccccgaggctcccctggaagccaaggacgtgatcctgacttccggttgttcgcaggccatagatttatgtctcgctgtgctggcaaaccctgggcagaacattctggttccgaggccggggttttccctatataaaacactggcagagtccatggggatagaagtcaaactatacaatctgctacctgagaaatcatgggaaatcgacttgaagcaacttgaatatctgatcgacgaaaagaccgcatgtctgattgtgaacaatccatcaaatccttgtggctcagtcttcagcaagcgccacttacagaaaatcctggccgtggcagcgcgccagtgtgtgcctatattggctgatgaaatctacggtgacatggtcttttcagactgtaaatacgagcccctggccacactctctactgatgtgcctatcctgtcctgcggtgggcttgcgaaacggtggctggtaccgggatggaggctcgggtggatactgattcatgatcggcgggatatcttcggcaatgaaatccgagacgggctggtgaaactctcccagcggatcctgggcccttgtacaatagtgcaaggggctttgaaaagtatcctgtgccggaccccgggagaattttatcacaacactctgagctttcttaagtctaatgccgacttgtgctacggagcgttggcagccatcccggggctccggcctgtgcgcccatcgggggcaatgtacttaatggtggggatcgagatggaacattttccagagttcgagaatgatgtggaatttaccgaaaggctggtggccgaacagagcgtccactgtctgccagccacttgcttcgagtacccaaatttcatccgagttgtaatcaccgttcctgaagttatgatgctcgaggcctgttcgcggatccaagagttttgcgagcaacactaccattgcgccgagggttcccaggaggagtgtgacaag

SEQ ID NO: 20734 - DNA, 1362 bp, synthetic construct
  misc_feature 1..1362: note = source = /note="Description of Artificial Sequence: Synthetic coding sequence"
  source 1..1362: mol_type = other DNA
atggatccctacatgattcaaatgagttcgaaggggaacctgcccagtatcttggatgtccacgtgaacgtgggcggccgctcgtcagtgccgggaaaaatgaagggaaggaaggctcgttggagcgtgcgcccaagcgatatggcgaagaagactttcaaccccatccgtgccatcgttgacaatatgaaggtcaaacccaacccaaacaagaccatgatttccctgtcaattggggatcccaccgtgtttggtaacttgcctacggatcccgaggtgactcaggcaatgaaggacgccctggacagcggcaagtataatggatatgcacccagcataggatttttgtcctcccgagaggagatcgcgagctactaccactgccccgaggcccccctggaagccaaagacgtgatcttgactagcggctgcagccaggctatcgacttatgcctggcagtgctggccaatccgggccaaaatatcctggtgccaaggcctgggttcagtctctacaagacactggcggaatctatgggcatcgaggtcaaactgtacaacctgctccctgagaagtcctgggaaatagacttgaaacagctcgaatacctgatagatgagaagacagcctgtttgattgttaataaccctagcaatccttgtggcagcgtgttctcaaagcgacacctccagaagattctcgccgtagcggcaaggcaatgcgtgccaattctcgccgatgagatctacggcgatatggtgttttcagattgcaaatacgagcccctagccactttaagtacagatgtgccaatcctgtcatgcgggggactggccaagagatggctggtgccaggctggcgcttgggttggatcctgattcatgaccggagggacatcttcggaaacgaaatcagagatggccttgttaagctgtctcagaggattctgggtccctgtactattgtccagggtgcactgaaaagcattctgtgcagaactccaggagaattctatcacaatacgctgtctttcctgaaatctaacgccgatttatgttacggtgctctagccgccattccaggcctgaggccagtcaggcccagtggcgctatgtatctgatggtgggcatagagatggaacatttccccgaattcgaaaacgatgtggagttcacagaacggcttgtggccgagcagtcagtccactgcctcccagctacctgtttcgagtaccccaattttatccgggtcgtaatcacagtgcccgaggtgatgatgcttgaggcttgctccagaatacaggagttttgcgagcagcactaccattgtgccgaagggagtcaggaagagtgtgataag

SEQ ID NO: 20735 - DNA, 1362 bp, synthetic construct
  misc_feature 1..1362: note = source = /note="Description of Artificial Sequence: Synthetic coding sequence"
  source 1..1362: mol_type = other DNA
atggacccctatatgatccagatgtcctccaagggaaatctgccatcaatcttagacgttcacgtgaatgttgggggccgcagctctgttccagggaagatgaaggggcggaaggcccggtggagcgtccgcccttcagacatggccaagaaaacattcaaccctatacgagcgatcgttgacaatatgaaggtcaaaccgaaccctaacaaaactatgatcagtctgtcaattggagacccgactgtcttcggcaacctgccaacagatcccgaggtaacacaggccatgaaagacgcgctggattctgggaaatataacggctatgctccgtccattgggttcttgagttctagagaggaaattgcgtcatactatcattgtcccgaagcacccctggaggcaaaggatgttatccttacctcagggtgctcccaggctattgacttgtgtctggctgtgctggccaatccgggacaaaacatcctggtccccaggcccggcttttcactctataagactctggcagagtccatggggatagaggttaaactttataatctgctgcccgaaaagtcttgggaaatcgatctcaaacagcttgagtacttgatcgatgaaaagacagcttgcttaatcgtaaacaatccctctaacccctgtggctcagtcttctccaaacggcatttacagaaaatccttgccgtagcagccaggcaatgtgttcccatcctggcagatgagatatatggagatatggtcttctcagactgcaagtacgaaccactagcaaccctaagcactgacgtaccaatactgtcctgcggcggcctggccaaaagatggttggtgcccgggtggagactgggctggatattgatccatgatcgacgcgacatctttggcaacgaaattagggacggactggtgaagctgtctcagcggatactgggaccctgtacaatagtgcagggcgctttgaaaagtatcctgtgccggacgccaggcgaattttaccataatacgctcagttttctgaagtcgaacgcagatctttgttatggtgctctcgccgctatccctggactgcgccctgtacggccatccggggccatgtacctgatggtgggaatcgagatggagcactttcctgagttcgaaaacgacgtggagttcacagaacgcctggtggcagagcagtctgtgcattgtctgcctgctacctgcttcgaatacccaaacttcatccgggtggtaattactgtcccggaggtcatgatgctagaagcatgctccaggattcaggaattttgcgagcagcactaccattgtgctgagggatcacaggaggagtgcgacaag

SEQ ID NO: 20736 - DNA, 1362 bp, synthetic construct
  misc_feature 1..1362: note = source = /note="Description of Artificial Sequence: Synthetic coding sequence"
  source 1..1362: mol_type = other DNA
atggatccttatatgattcagatgtccagtaaaggtaaccttcccagcattctcgatgtgcatgtaaacgtgggaggtcgttcaagtgtccctggcaagatgaagggcagaaaagccagatggagtgtgaggccctcagacatggctaagaagaccttcaatcctatcagggccatcgtcgacaacatgaaagtcaaaccgaaccctaacaaaaccatgatctccctatcaatcggggacccgaccgtgtttggcaacctccccaccgacccagaagttacacaggccatgaaagatgcccttgactcgggcaagtacaatggctacgctccttcaatcggcttcctgagtagccgcgaggagatagcctcatactaccattgcccagaggctcccctcgaagccaaggatgtgattcttacctctggctgtagccaagccatcgacctctgcctagccgtactcgctaacccagggcagaatatcttagtgcctcgtccggggttctccctgtataagacactggccgagagtatgggaattgaggttaagttgtacaatctgctccctgaaaagtcgtgggaaatcgacttaaagcaactggaatacttgattgacgaaaagacagcttgcctgatcgtgaacaaccctagcaacccgtgcggctccgtgttcagcaaacgccacctgcagaagatactggctgtagcggcccggcagtgtgttccaatcctggctgacgagatctacggcgatatggtcttctctgattgcaagtacgaaccgctcgcaactctgagtacagacgtgcctatcctgagctgcggagggctggcaaaacggtggttggttcccggctggcggcttggatggatcctgatccacgacagacgggacatttttggtaatgagatccgggatggcctcgtcaaactgtcccagaggattctcggcccctgtactattgtacagggcgccctgaagtctattctgtgtcgcactccaggcgaattttaccataacacactgtcgtttctcaaatctaacgcagacctttgttacggagctttagctgcgatccctggattgcggcctgtaagaccttctggggcaatgtacctgatggtgggaatcgaaatggagcacttccccgaatttgagaacgacgtggagtttacagagcggctcgttgccgaacagtctgtgcactgcctgcccgcaacttgctttgagtatcctaattttattcgagttgtgattactgtgcctgaagtgatgatgctcgaggcatgctccagaatacaggagttttgtgagcagcactaccattgtgccgaaggtagccaggaggagtgcgacaaa

SEQ ID NO: 20737 - DNA, 1362 bp, synthetic construct; identical to SEQ ID NO: 20713
  misc_feature 1..1362: note = source = /note="Description of Artificial Sequence: Synthetic coding sequence"
  source 1..1362: mol_type = other DNA

SEQ ID NO: 20738 - DNA, 1362 bp, synthetic construct
  misc_feature 1..1362: note = source = /note="Description of Artificial Sequence: Synthetic coding sequence"
  source 1..1362: mol_type = other DNA
atggatccgtacatgattcaaatgtcgtcaaaaggaaatttgccgtcgatccttgatgtgcatgttaatgttggaggaaggtcctcggtgccgggaaaaatgaaaggccgaaaagcacgttggagcgtacgtccgagtgatatggcgaaaaaaactttcaatcccatacgggctattgttgataacatgaaagttaagcccaacccaaacaagacaatgatttcacttagtattggagatccaacagtgttcggaaatttgccgacggatccggaagtgactcaggctatgaaagatgctctggattcgggtaagtacaacggttatgcaccttcaataggattcttgtcatcacgcgaagaaattgcttcctattatcattgtcctgaggctccactggaagcgaaagacgtcatactcacttctggatgctcacaagcaatagacctttgtctcgccgtcctcgccaatccaggacagaatattttggtcccaaggccaggattttcgctttacaagacactcgctgaaagtatgggaatcgaggtcaaattgtataatttactcccagaaaagtcatgggaaattgacctaaaacagctggagtatcttattgatgaaaagaccgcttgtcttatagtcaataaccctagcaacccatgtgggtcagtatttagtaaacgtcatctacaaaaaatccttgcggtagctgccagacagtgtgtacccatccttgcagatgaaatttatggtgatatggtgttttctgattgcaagtacgagccactggcaaccctcagcaccgacgtgccaattctttcttgtggtggactagctaaacgatggcttgtgccgggatggcgtcttgggtggatcttgattcacgatagacgagatatttttggcaacgaaatacgagatggactcgttaagctttcacaaagaatcttgggaccttgtactattgtacagggagctttaaagtcaattctttgcagaacccctggagagttttaccataatacattatcattcttaaagtcaaacgccgatttgtgttatggagctctcgcggcaatcccaggcttaaggccggtacgaccgagcggagcgatgtacttgatggtcggtattgagatggaacatttcccagagtttgaaaacgatgtggaatttactgagagacttgtggctgagcagtcagtccactgtcttccagctacgtgttttgaatatccaaatttcatacgagttgttatcacagttcctgaagttatgatgctagaggcatgctcaagaatacaagagttttgcgagcaacactaccattgtgctgagggttcgcaagaagagtgtgataaa

SEQ ID NO: 20739 - DNA, 1362 bp, synthetic construct
  misc_feature 1..1362: note = source = /note="Description of Artificial Sequence: Synthetic coding sequence"
  source 1..1362: mol_type = other DNA
atggatccctacatgatccaaatgtcatccaaagggaatctcccatcaattttggacgttcacgtaaacgtgggggggcgaagttctgtgcccggaaagatgaagggccgaaaagcgcgctggtcagttcggcccagcgatatggctaagaaaacttttaacccaataagggccatcgtcgacaacatgaaagtcaagccgaatcccaataaaacgatgatctcactgagtataggagatccaaccgtctttggcaacctccccacggacccagaggttactcaggccatgaaagatgcgttggactctgggaaatacaacggctacgctccgagtattggattcctctcttcacgggaagaaatagcatcatactaccactgccccgaggccccactggaggcaaaggacgtcatactgacttccggatgcagtcaggcgatcgacttgtgcctcgccgtgctcgccaacccaggacagaacattctggtacccaggcctggtttttctctgtataagacattagctgaatccatgggcatcgaagtgaaactgtacaatcttctgcctgagaaaagctgggaaatagacctgaaacaactcgaataccttatagacgaaaaaacagcatgcctgatcgtgaataatccatcaaacccctgcggaagtgttttctctaagcgccaccttcagaaaatcttggccgtggcggccagacaatgtgtaccaattctcgccgacgagatctacggagacatggtgttttcagactgtaagtacgaacccctggccactcttagtactgacgtaccgatcttaagctgcggcgggctggcgaaacggtggttggtcccaggatggaggctcgggtggatcctcattcatgatagaagagacatttttggaaacgagattcgggatgggctcgtcaagctctcccaacggatcttgggcccttgcacaatcgtccagggggccctgaagtccattctctgtaggacgccaggtgagttctaccacaatactttgagttttctgaaaagtaacgccgacctatgttatggcgcactggccgccatccctggtctgaggcctgttaggcccagcggcgctatgtatctgatggtgggtatcgagatggagcatttcccggagtttgaaaatgatgtggaattcacagagcgcctggtggccgaacagtctgtccattgtctgccagccacttgttttgaatatcctaatttcataagggtagtcatcacggttcctgaagtcatgatgttggaggcctgcagtcgcattcaagagttctgcgagcagcattaccactgtgcagagggatcccaagaagaatgtgataag

SEQ ID NO: 20740 - DNA, 1362 bp, synthetic construct
  misc_feature 1..1362: note = source = /note="Description of Artificial Sequence: Synthetic coding sequence"
  source 1..1362: mol_type = other DNA
atggatccgtatatgatacaaatgtcgtcgaaaggtaatctaccgtcgatactagatgtacatgttaatgtaggtggtcgttcgtcggttccgggtaaaatgaaaggtcgtaaagcgcgttggtcggtacgtccgtcggatatggcgaaaaaaacgtttaatccgatacgtgcgatagttgataatatgaaagtaaaaccgaatccgaataaaacgatgatatcgttatcgataggtgatccgacggtttttggtaatttaccgacggatccggaagttacgcaagcgatgaaagatgcgctagattcgggtaaatataatggttatgcgccgtcgataggttttttatcgtcgcgtgaagaaatagcgtcgtattatcattgtccggaagcgccgttagaagcgaaagatgtaatattaacgtcgggttgttcgcaagcgatagatttatgtctagcggtattagcgaatccgggtcaaaatatattagtaccgcgaccgggtttttcgttatataaaacgctagcggaatcgatgggtatagaagtaaaattatataatctattaccggaaaaatcgtgggaaatagatttaaaacaactagaatatttaatagatgaaaaaacggcgtgtttaatagtaaataatccgtcgaatccgtgtggttcggttttttcgaaacgtcatctacaaaaaatactagcggttgcggcgcgtcaatgtgttccgatattagcggatgaaatatatggtgatatggttttttcggattgtaaatatgaaccgctagcgacgttatcgacggatgtaccgatactatcgtgtggtggtctagcgaaacgttggttagtaccgggttggcgtttaggttggatactaatacatgatcgtcgagatatatttggtaatgaaatacgtgatggtttagtaaaattatcgcaacgtatattaggtccgtgtacgatagttcaaggtgcgctaaaatcgatattatgtcgtacgccgggtgaattttatcataatacgttatcgtttctaaaatcgaatgcggatctatgttatggtgcgctagcggcgataccgggtttacgaccggttcgaccgtcgggtgcgatgtatttaatggttggtatagaaatggaacattttccggaatttgaaaatgatgtagaatttacggaacgtctagttgcggaacaatcggttcattgtctaccggcgacgtgttttgaatatccgaattttatacgagtagtaataacggttccggaagtaatgatgttagaagcgtgttcgcgtatacaagaattttgtgaacaacattatcattgtgcggaaggttcgcaagaagaatgtgataaa

SEQ ID NO: 20741 - DNA, 1362 bp, synthetic construct
  misc_feature 1..1362: note = source = /note="Description of Artificial Sequence: Synthetic coding sequence"
  source 1..1362: mol_type = other DNA
atggacccgtacatgattcagatgagctctaaaggcaatctgcccagcatcctggacgtgcatgtgaacgttggcggacgaagtagtgtaccagggaagatgaaaggccgcaaagccaggtggagcgttcgcccgtccgatatggcaaaaaagacctttaatccaattcgtgcgatcgttgataacatgaaggtcaaacccaacccgaacaaaacaatgattagccttagcattggggaccccacagtcttcgggaacctgccgacagatcccgaggtcacacaggcgatgaaagacgctcttgatagtggcaagtataacggctacgcgccgtccattggatttctgtcctcccgcgaggaaatcgcctcatactaccactgcccagaggcacccttggaggcaaaagacgtgatcttgaccagcggctgctcacaggcaatcgatctttgtcttgccgttctggcaaaccccggtcaaaacattctggtccctagacctggattttcgttgtataagactttggccgagtctatgggcattgaggtcaaactctacaacctgttgcctgaaaagagctgggagattgatctgaagcaattggagtacctgatcgatgaaaaaacagcgtgccttatcgttaacaacccaagtaacccctgcggcagcgtcttcagcaagcgccaccttcagaagatcctggccgtggctgcccgccagtgtgtgccaatccttgcagacgagatctacggtgatatggtgttctctgactgtaagtacgaacccctagctacattgtctaccgatgtccccatcctctcatgtggtgggttggctaagagatggttggtgcccggatggcgcctcggatggatactgattcacgatcggagggatatctttggaaacgagatccgcgacggactggtgaagttgtcacagagaattctcgggccatgcacaatcgttcaaggagctctcaaaagtatcctgtgccgaacgcccggagaattttaccataacaccttatccttcttaaagagcaacgcagatttgtgctatggggccctcgcagctatcccgggcctgcgcccagtaaggcctagtggagctatgtatctcatggtggggatcgagatggagcactttccggagttcgagaacgatgtggaatttactgagagactagtggccgagcagtctgttcactgtctgccagctacctgctttgaatacccaaactttatcagagttgtgatcacagtcccagaagtgatgatgctcgaggcttgctctcgtatccaggagttttgtgagcagcactatcattgcgcagaaggcagtcaggaagaatgcgacaag

SEQ ID NO: 20742 - DNA, 1362 bp, synthetic construct
  misc_feature 1..1362: note = source = /note="Description of Artificial Sequence: Synthetic coding sequence"
  source 1..1362: mol_type = other DNA
atggacccctacatgattcagatgagtagcaaagggaacctcccaagcatattggatgtgcacgtaaacgtgggcggacggtcttccgtccccgggaaaatgaaagggagaaaagcccgatggtcagtccgcccctccgacatggctaaaaagaccttcaacccgattagagccattgtggacaatatgaaggtaaagccaaacccgaataagaccatgatctccctgagcattggcgatcctaccgtgtttgggaacctccctacagaccccgaggtgacgcaagccatgaaggatgccttggattctggcaaatataatggatatgccccctcaataggcttcctgtcctcccgcgaagagattgctagctactatcactgccccgaagctcccctggaggccaaagacgtgatcctgacaagtggatgttcccaggcgatcgatctctgcctggcagtgctggcgaaccccgggcagaatattctggtgccgagacctggcttctcactgtacaaaaccctggcagagtccatgggcatcgaagtgaagctgtataacctgctgccagagaagtcttgggagatagacctgaagcagctggagtatttgatcgacgagaagaccgcatgcctcatagtgaataatccatctaatccttgtggatcagtcttctccaaaagacacttgcagaagattctggcggtagccgcaaggcagtgtgtacccattttggctgacgagatctacggcgatatggtcttctcagactgcaagtacgagccccttgctacacttagtacagacgtcccgatcctgagctgtgggggactggccaagagatggctggtgcccggatggcgcctgggttggatactgatacatgatcggcgcgacattttcggaaatgagattagggacgggctggtgaagctgtcccagcgcatcctcgggccatgtacgattgtccagggtgccctgaagtccatcttgtgtcgaactcccggggagttctaccataacactctttcctttttgaaaagcaacgcggacctttgctatggcgcgctggcagccattcctggcttgcggcctgtacgccccagtggcgctatgtacctcatggttggcattgagatggaacactttccggaatttgagaatgacgtggagttcacagaaaggctggtggccgagcaatctgtccactgcctgccagccacctgcttcgagtatcccaattttatcagagttgtgatcacagtgccagaggttatgatgctcgaggcctgctccagaattcaggaattctgtgaacagcattaccactgtgccgaaggcagtcaagaggaatgtgataag

SEQ ID NO: 20743 - DNA, 1362 bp, synthetic construct
  misc_feature 1..1362: note = source = /note="Description of Artificial Sequence: Synthetic coding sequence"
  source 1..1362: mol_type = other DNA
atggacccttatatgatacaaatgtcgtctaagggcaatcttccatcgattctcgacgttcatgttaacgttgggggacggagctccgtgcctggtaaaatgaaaggtaggaaggctagatggagcgttcgccctagcgatatggcaaaaaagacatttaatccaatacgtgcaattgtagataacatgaaggtgaagcctaatccaaataaaacaatgatttcgctttcgattggtgaccctaccgtctttggcaacctacctactgacccagaagttactcaagccatgaaagatgctctcgactccggaaaatacaacggatatgctcctagtatcggtttcctttcaagccgggaggaaatagcttcatactaccattgcccggaggcacctctggaggcaaaggatgtgattttgaccagtggatgcagccaagctatcgatctttgccttgctgtccttgctaatcctggtcaaaacatactggtaccccgacctggattttctctttataagacccttgctgaaagcatgggaattgaagttaaactgtacaacttactcccagagaagagttgggagatcgatttgaaacaactagagtatttaattgacgagaagactgcgtgcttgattgtgaacaacccatctaacccatgtggaagcgtctttagtaagcgtcatctgcagaagatcctcgctgtggccgctagacagtgtgtcccaatcctggccgatgagatctatggtgatatggtgttttctgactgcaagtatgaacctttagctaccctgagcactgatgttcctatcttgagctgtggtggattagctaagaggtggttagttcccggttggcgcctcggatggatccttattcacgatcgtcgggatattttcgggaatgagattagggatggtctggttaagttgtcccaacgtattctggggccatgtacgattgttcagggggctctgaagtctatattatgtagaactcctggcgagttttaccataatactctttccttcttgaagtctaacgcagacctctgttacggcgctttggccgctattccagggctcaggccagttagaccaagtggggctatgtatcttatggtgggaatcgaaatggaacactttcctgaatttgagaatgatgtggaattcaccgagcgacttgtagctgaacaatcagttcattgtttgcctgctacttgtttcgagtacccaaatttcatccgtgtagtgattactgttcctgaagtcatgatgttggaggcctgttcgcggattcaggaattctgtgagcagcactatcactgcgctgaagggtcacaagaggagtgtgataag

SEQ ID NO: 20744 - DNA, 1362 bp, synthetic construct
  misc_feature 1..1362: note = source = /note="Description of Artificial Sequence: Synthetic coding sequence"
  source 1..1362: mol_type = other DNA
atggacccttacatgatccagatgtcctccaagggcaacctgccctccatcctcgacgttcatgtcaacgttggagggaggtcttcggtccccggcaagatgaaaggaaggaaggctagatggagcgttcggccaagcgatatggctaagaaaacatttaaccctatcagagctatcgtggataacatgaaagtaaaacccaacccaaataaaactatgatctctctttcaataggtgacccgacagtatttgggaacctccctactgaccctgaagtcacccaagccatgaaggatgcactggattccggcaaatacaacgggtacgccccatccataggtttcctgagttccagggaagaaatcgccagttactaccactgtcctgaggcccctctggaggctaaggatgtgattctgacgtcaggctgcagtcaagcgatcgacttgtgcttggctgttcttgctaatcccggccaaaacatcctggtccctcggcccggttttagcttgtataagaccttggcagaaagcatggggatcgaggtgaagctgtacaatctcctgcctgagaagagttgggagattgatctgaaacagctggaatacttgatcgatgagaagacagcatgtttaatcgtcaataacccctcaaacccttgcgggtctgtgtttagcaaaaggcaccttcagaagattcttgccgtggctgctaggcagtgcgtgcctatcttggcagatgaaatttacggagacatggttttttctgattgtaaatacgaaccactggcaacgctctccacagatgtgccaatactcagctgcggagggttagcaaagcgttggcttgtacctggatggagacttggctggatacttatccacgataggagagatattttcggcaatgaaattagagacggacttgtgaaactgtcacaaagaatcctgggcccctgtactatagtccagggagctctgaaaagtattctctgccgcacacctggggaattctatcataatacattgagtttcttgaaatcaaatgccgatctttgttatggtgccttggccgccatccccgggctgaggcctgtgagaccttcaggagctatgtacttgatggtgggaatcgaaatggaacactttccagagttcgagaacgacgttgagtttaccgaaaggctcgtcgcagagcaaagcgtccactgcttgccagcaacttgctttgaataccctaacttcatcagagtcgtgataaccgtccctgaagttatgatgctggaggcgtgttcaaggattcaggagttctgtgagcagcattaccactgcgctgaggggagccaggaagagtgcgataaa

SEQ ID NO: 20745 - DNA, 1362 bp, synthetic construct
  misc_feature 1..1362: note = source = /note="Description of Artificial Sequence: Synthetic coding sequence"
  source 1..1362: mol_type = other DNA
atggacccctacatgattcagatgtcatccaaaggaaacctgccctcaattctcgatgtccatgtgaatgtgggcggcaggtcctctgttcctggtaagatgaagggaagaaaggcccggtggtctgttagaccgtccgacatggctaaaaaaacattcaatcctatcagagccatcgtcgataacatgaaagtgaaaccgaacccgaacaagaccatgatttccttgagcatcggtgatccaacagttttcgggaacctccctactgacccggaggtcacgcaggcaatgaaggacgccttggactctggtaagtacaatggatacgccccctctattggcttcctgtcaagccgcgaggagatcgcttcttactaccactgccccgaagctcccctggaagctaaggacgtcatcctgacttctggctgctctcaggctatcgatctgtgcctcgccgtactggccaacccaggacagaatatcctcgtgccaaggcctggattttctctgtataagaccctggctgagagcatggggatcgaagtgaagctgtacaatctgttgcccgagaaatcttgggagatcgatctcaaacaactggagtatttgattgacgaaaagacagcatgcctgattgtaaataatccgtctaatccctgcggaagtgtcttttctaagaggcatctgcaaaaaatacttgcggtcgccgcacggcagtgcgtgcctatactggcggatgagatttatggcgatatggtcttttccgattgtaagtatgagccattggctaccctgtccactgacgttccaatattgagttgcggaggcctggccaaaagatggctggtgccagggtggcgcctgggctggattctgattcatgacaggagggacatcttcgggaatgagattagagatgggctggtcaaactgtcccagcgcatattgggaccctgcacgatagtccaaggtgcactgaaatctatactgtgtcgcaccccgggagagttctaccacaatactctgagcttccttaagtctaacgctgatctgtgttacggagcacttgccgcaatcccaggtctccggcccgtgaggccctctggtgctatgtacctcatggtagggatcgagatggagcatttcccagaattcgagaacgacgtggagtttactgaaagacttgttgcggaacagtcagttcactgtcttcccgccacctgtttcgaataccccaacttcatccgggtcgtgatcactgtgcctgaagtcatgatgctggaagcctgcagcaggatccaggagttctgtgagcagcattatcattgtgccgagggtagccaggaagaatgtgataag

SEQ ID NO: 20746 - DNA, 1362 bp, synthetic construct
  misc_feature 1..1362: note = source = /note="Description of Artificial Sequence: Synthetic coding sequence"
  source 1..1362: mol_type = other DNA
atggacccttacatgattcagatgtcctccaagggtaacctgccgtctatcctggacgtccacgtcaacgtcggcggtcggtcatctgtgcctggcaaaatgaagggtcgcaaagcacgctggagcgtccgcccaagcgacatggccaaaaaaacgttcaatcctataagggcgattgtcgataacatgaaggtgaaaccgaatccaaacaaaactatgattagcctgtcgatcggcgacccaactgtcttcggtaacctgcctacggaccctgaggttacgcaagccatgaaggatgctctggatagtggaaaatacaatggatatgccccaagtatcggattcttgagctcccgcgaggagatcgcctcctactatcactgcccagaggctccactggaggcgaaagacgtcatactcacctctggatgcagccaagcaatagatctgtgtctggcagtgctcgctaatccaggtcagaacatcctggttcctcgcccggggttttccctgtacaaaacgctggcggaatcgatggggattgaggtgaagctgtataatctcctgcctgagaaatcttgggaaatagaccttaaacagctcgagtatttgatcgatgaaaaaaccgcgtgcctaatcgtgaacaatccatcgaatccttgtggaagtgtttttagcaaaagacatctgcaaaagatcctggctgtggcggcacgccagtgcgtccctatcctggcggacgagatctacggcgacatggtcttttcggattgtaaatatgagccgctggcaacgttgtcaaccgacgttcccattctgagctgcggtggtctggccaagaggtggttggtgcccggatggcgattgggttggatcctgattcacgatagacgcgatatattcgggaatgagattcgcgatggcctcgtcaaactgagtcagcgtattctgggcccgtgcaccatagtccaaggtgcactgaaatcaattctgtgcagaaccccaggcgaattttaccacaataccttgtcttttctgaagagcaacgccgatctgtgttatggagcgctggccgcaatcccaggtctgcgtccggttaggccatcgggagctatgtatttgatggtcggcatagagatggagcactttcccgaatttgagaacgacgtcgaatttaccgagagattggtggcggaacagtctgtgcattgtctgccagctacttgctttgagtatcctaatttcataagagtggtcatcactgtccccgaagttatgatgctagaagcctgcagccgaattcaagagttttgcgagcagcattaccattgcgccgagggcagccaggaggagtgtgacaaa

SEQ ID NO: 20747 - DNA, 1362 bp, synthetic construct
  misc_feature 1..1362: note = source = /note="Description of Artificial Sequence: Synthetic coding sequence"
  source 1..1362: mol_type = other DNA
atggatccttatatgattcagatgtcttctaaagggaacttgccatctatactcgacgttcatgttaatgtgggagggagatcctcagtgccagggaaaatgaaagggcgcaaagcacgctggtctgtgcgcccttccgatatggcaaaaaagactttcaaccctattcgcgccatagtggataatatgaaagtaaaacctaacccgaacaaaacaatgatctctctcagtataggggatcccactgttttcggaaacctccctacggatcccgaggtgactcaggccatgaaagatgccttagattcaggaaaatataatggatacgcaccatctattggatttctttcaagtcgggaagaaatcgcaagttattaccattgcccagaagctcccctggaagccaaagacgttatacttacatccgggtgctcccaagcaatcgatttatgtctcgccgttcttgcaaaccccgggcagaacatactagtgccccggcctggattctccctttataaaactctcgccgaatccatggggatagaagtgaaactctataatctcctacctgaaaaatcctgggaaatagatctgaagcagctcgaatatttaatagatgaaaaaactgcttgcctcatagtgaacaacccttcgaacccatgtggaagtgtgtttagtaagagacacctgcagaaaatcttagccgtcgcagcccggcagtgtgtgcccatcctggccgacgagatttatggagacatggtgttctcagactgtaaatatgagcctctggcaacactgtctacagacgtgcccatcctctcctgtggaggactcgctaagcgttggttagttcccggatggcggttaggatggatcctcatccacgatagaagagatatattcgggaacgaaattcgggatgggttggtgaaactatcccagcggatacttgggccttgcacaatcgttcagggggccctcaaatcaatactctgccgcactcccggagaattttatcataatactctctcattcctaaaaagtaacgcagatctgtgctacggggccttagctgctattccaggactgaggcccgtgcggccatcaggggctatgtacctcatggtgggaatcgaaatggaacattttccagagttcgaaaacgatgtagaatttacagaaaggctggtcgccgaacagtctgtgcactgcctccctgccacttgttttgaatatcccaattttatacgggttgtgataacagtacccgaggttatgatgctcgaagcctgctcgaggattcaggaattctgtgaacagcactatcactgcgccgaggggtcccaggaggagtgcgacaaa

SEQ ID NO: 20748 - DNA, 1362 bp, synthetic construct
  misc_feature 1..1362: note = source = /note="Description of Artificial Sequence: Synthetic coding sequence"
  source 1..1362: mol_type = other DNA
atggatccgtacatgattcagatgtcctcaaagggcaatcttccttccattctagacgtgcatgtgaacgtcggaggtaggtcaagtgtgcccggtaagatgaaaggacgtaaggctaggtggtctgtgcggccaagtgatatggcgaagaagaccttcaaccccattcgtgcaatcgtcgataacatgaaagtcaaacctaacccgaataaaacgatgattagtctgagtataggggaccctactgtctttggtaatcttccaacagatccggaggtgactcaggctatgaaagacgcactcgatagcggcaagtacaacggatacgccccctccataggcttcctctcctctcgtgaagagatcgcgagctattatcattgtccagaggccccactggaggcaaaggacgttatcctgacatctggctgtagccaggctatcgacctttgtctggcggttctggctaatcccgggcagaatatccttgttccccgacccggtttcagtctctataaaacattggcagagtctatgggcatcgaggtcaaactgtataacctgctgcccgagaagtcttgggagatcgatctgaaacagctggagtacttgatagacgagaaaaccgcgtgtcttatcgtgaataatcctagcaatccctgtggtagcgtgtttagtaagcggcacttgcaaaagatacttgcggtggccgcgaggcaatgtgtgccaatcctcgccgatgaaatatacggagacatggtcttctcagattgtaagtacgagcctctggcaactctgagcactgatgttcccatcctttcttgtggagggctcgctaaacgctggctggtccctgggtggcggctgggttggatcctcatccatgatagaagggacattttcggcaacgaaatcagagatggcttagttaagctgagtcagaggattctgggaccttgcacgatcgtgcagggagctttgaagagcattttatgtagaaccccgggggaattttaccacaacaccctgagctttctgaagtctaacgctgatttgtgttacggcgctcttgcggcaattccgggactacgtccggtcagaccatccggtgccatgtacctgatggttgggattgagatggaacattttccagagtttgaaaacgacgtcgaatttacagagcgcctggtagccgagcaatcagtgcactgcctgcctgcaacctgcttcgaataccctaatttcattagggtagttataactgtgcctgaagtgatgatgttggaggcctgttctcggattcaggagttctgcgagcagcactatcactgcgcggagggcagccaggaagagtgcgataag

SEQ ID NO: 20749 - DNA, 1362 bp, synthetic construct
  misc_feature 1..1362: note = source = /note="Description of Artificial Sequence: Synthetic coding sequence"
  source 1..1362: mol_type = other DNA
atggatccatacatgatacaaatgagctccaagggaaatctgccctccattctagacgtgcatgtgaacgtaggtggtagatctagtgttcccggaaagatgaaggggcgaaaggccagatggagcgttagaccaagtgacatggcaaaaaagacatttaaccctatccgggcaattgtggataacatgaaggtaaagccaaatcctaataagaccatgatctccttgtccattggagatcccaccgtgttcgggaaccttccaaccgatcctgaggttacccaggcgatgaaggatgccctggattctggaaagtataatggatatgcccccagcatcggctttctttctagtagggaggaaatagcttcttactaccactgccctgaggcgccgctcgaggccaaggatgtcattctcactagtggttgctcccaggccatagatctctgcctggccgtcttggccaaccctggccagaatatactagtcccaagacccggcttcagcctttacaagacactggccgagtccatgggcatcgaagttaaactgtacaatctgttacccgagaagagttgggaaatcgacctaaaacagcttgagtatctcattgatgagaagaccgcgtgtctgattgtcaacaaccccagcaacccttgcggatcggttttttccaagagacatctccagaagattctcgccgtcgcagccaggcagtgcgtaccgatactggcggacgaaatttatggcgatatggtgttttcagattgcaaatacgagcccctcgccaccctgtctaccgatgttcctattctgtcttgcggcggtctggcgaaacgatggttggttccaggatggaggctggggtggatccttatccacgatagaagagatattttcggtaacgagatccgagatggcttagtcaaattgtctcagcgtatccttggcccttgcaccattgttcagggcgcactgaagtctatcctgtgcaggacgcccggagagttttaccacaatacgttgtccttcttgaagtctaacgcagacctttgctatggggccctcgccgccatcccaggcttgaggccagtccggccaagcggggcaatgtacctcatggtcggaatcgagatggagcacttccccgaatttgagaatgatgtggaattcacagagagattagtagccgagcagtccgtgcactgtctgcctgcgacatgtttcgaatatccaaatttcattagggtagtgattacagtgccagaagttatgatgctcgaagcctgctcgaggattcaggaattctgcgaacaacactaccactgtgccgagggttcccaggaagaatgcgacaaa

SEQ ID NO: 20750 - DNA, 1362 bp, synthetic construct
  misc_feature 1..1362: note = source = /note="Description of Artificial Sequence: Synthetic coding sequence"
  source 1..1362: mol_type = other DNA
atggacccatacatgatccagatgagttccaagggcaacctgccgtctattttggacgtgcatgtgaacgtgggaggaaggtccagcgtcccagggaagatgaagggaaggaaggctcgatggtccgtgaggccctcagacatggccaaaaagacatttaaccctattagggctatcgtcgataacatgaaggttaagccaaacccaaacaaaacaatgatcagtctttcgatcggagacccgacagttttcggaaacctgcccaccgatccagaggttactcaggctatgaaagacgccctggacagcggcaagtataatggttatgccccttccatcggtttcctgtcgagtcgcgaagaaatcgcatcatactatcactgtccagaagcacccctggaggctaaagatgttatcctgacgtcgggatgttcccaggccatcgacttgtgcctcgcagttctcgccaatcccggtcagaatatattggttcctaggcccggttttagcctttataaaaccttggctgagagcatgggcattgaggttaagctctacaacctcttacccgagaagagctgggaaatcgatttgaagcagctagaatatttaatagatgaaaagacagcgtgtctgatagtgaacaacccatccaatccctgcggctcggtgttcagtaagcgtcacctccagaaaattctcgctgtagccgctcgacagtgcgtgcccatactcgcggatgaaatttatggtgacatggtgttcagtgactgtaaatacgagcctctagctaccttatccacagacgtccccattctgtcttgtgggggtctggcaaagcggtggttggtccctggctggagattagggtggattttaatccatgatcgcagagacattttcggtaatgaaatccgggacggactggtaaagctgtcccagaggatcctgggcccctgtactattgttcaaggagctctgaagtctattctgtgtcggacaccaggcgaattctatcacaacacgctgtctttcctgaaatccaacgctgacctgtgttatggcgcgttagctgccatccctggtctacgccctgtccggccatcgggcgcaatgtatcttatggtcggtatcgagatggaacattttccagagttcgagaacgacgtggaatttacagagcggcttgtagcagagcagtctgttcactgtctgcccgcgacttgttttgagtatcccaatttcattcgggtggtgataacagtgcccgaagtcatgatgctggaagcctgttcaagaatccaggaattctgcgaacaacattaccattgtgcggagggatcacaggaagagtgtgacaaa

SEQ ID NO: 20751 - DNA, 1362 bp, synthetic construct
  misc_feature 1..1362: note = source = /note="Description of Artificial Sequence: Synthetic coding sequence"
  source 1..1362: mol_type = other DNA
atggacccttatatgatccagatgtcttcgaagggcaacctcccctccatccttgacgttcacgtaaacgtgggcgggcgaagttccgtccccgggaaaatgaaagggaggaaagcaagatggagtgtgaggccctcggacatggctaaaaaaaccttcaatcccattagggcgatcgtggacaacatgaaggtgaagccaaaccccaacaagacaatgatctctctctcaattggggacccaactgtgtttggaaacctaccaaccgacccggaagttactcaggctatgaaagatgctctggacagcggcaaatacaatggctacgctccatcaattgggtttctcagctctcgggaggagattgcaagctattaccactgccctgaggctccgttggaggcaaaagatgtgattctgactagcggatgttcccaggctatcgacctgtgtctggctgtcctagctaatcctggccagaatatactggtcccaagaccaggcttctccctgtacaagaccttggccgagagcatgggaattgaggtgaagctgtataacctcttgccagaaaaatcctgggaaatagacctgaagcagcttgaatatctaattgacgagaaaactgcatgtctgattgtcaacaacccaagcaacccctgtggcagtgtgtttagtaaaagacacctgcagaaaatccttgctgtggctgctaggcagtgtgtcccgattctagctgacgagatttatggagacatggtgttcagtgattgcaaatacgagccgctggctacactctcaaccgatgtgcccatactgtcatgtggcggacttgccaagcggtggctggttccaggctggcgcttgggctggatccttattcacgacagacgcgacatcttcggcaacgagatccgagacggcctggttaagctgagccagagaatcttaggcccatgcacgattgtacagggggcactgaagagcattctgtgccgcactccgggagagttctaccacaacactctgagctttctgaagtcgaacgcagatctgtgttacggtgcgctggctgccatccctgggctgaggcccgttagaccttctggtgccatgtatctgatggtgggcatagaaatggagcactttcccgaattcgagaatgacgtcgaattcacagaacgcctagtagcagaacagagcgttcattgcctccccgcgacctgcttcgagtacccaaatttcatccgcgtggtcattacagtacctgaagtaatgatgctcgaagcatgttcgcgaatccaggagttctgcgagcagcactatcattgcgcggagggaagtcaagaagaatgtgacaag

SEQ ID NO: 20752 - DNA, 1362 bp, synthetic construct
  misc_feature 1..1362: note = source = /note="Description of Artificial Sequence: Synthetic coding sequence"
  source 1..1362: mol_type = other DNA
atggacccttacatgatccaaatgtcctcgaaagggaacctcccaagtattttggacgttcacgtcaatgttggagggcgtagttctgtgccaggtaagatgaaagggcgaaaggcaagatggtccgtgaggcccagcgatatggccaagaaaacgtttaatcctatccgggcgatcgtcgacaatatgaaagtgaagcccaatcctaataaaacaatgatatccctttctatcggagacccaacagtgtttggtaacctgcccacagaccccgaagtgactcaggctatgaaagacgcactggactcaggtaagtacaatggttatgcacctagtatcggcttcctcagctcgcgcgaggaaattgcatcatattatcactgcccggaggctccgcttgaggcaaaggacgtgatcttgactagtgggtgttctcaggccattgacctctgcctggccgtcctggctaatcctgggcagaatatattggtgccacgccccggcttcagtctatacaagacactagcagaatcaatgggcattgaagtaaaactgtacaacctgctacccgagaagagctgggagatcgacctaaaacagctggagtacctgatcgatgaaaaaacagcttgcctgatcgtgaataatccatccaacccttgtggctcagtatttagcaagcggcatctgcagaaaatactggccgtggcggccaggcaatgtgtacccatactggcagatgagatttacggagacatggtcttttctgattgtaagtacgagccactggccacgctttcgaccgatgtcccaatactgtcttgcggtggtctggccaagcggtggttggtgcctggatggcgcctgggatggatcttgattcacgatcgtagggacatttttgggaacgagatccgcgatgggctggtcaaactcagtcagaggattctaggtccttgcaccatagtccagggggctctgaaatctatcctctgtcgaaccccaggcgagttctaccacaacactctatcattcctgaaatcgaatgccgacctgtgttatggcgctttagcagctatacccggactgcgaccggtgcggccttcaggagccatgtacctgatggtcggcattgagatggagcatttccccgagttcgaaaatgacgtggagttcaccgagaggctcgtcgccgagcagagcgtgcactgtctccctgccacttgttttgaataccctaatttcatcagagtggtcatcacagtgcctgaagttatgatgctagaggcttgttcccgcattcaggagttttgcgaacagcattaccattgcgccgaggggagccaagaagaatgtgataag

SEQ ID NO: 20753 - DNA, 1362 bp, synthetic construct
  misc_feature 1..1362: note = source = /note="Description of Artificial Sequence: Synthetic coding sequence"
  source 1..1362: mol_type = other DNA
atggacccatacatgattcagatgtctagtaagggcaatctgccaagcatcctggacgtccacgtgaacgtgggtggtagatctagtgtgcctggaaagatgaaggggcggaaagctcgctggagtgtaagaccttcagacatggcaaagaagaccttcaaccccattcgcgctatcgtcgataatatgaaagttaaaccgaaccccaataagacaatgatatcactttccatcggtgacccaaccgtcttcggcaacttgccaaccgacccagaagtcactcaggccatgaaagatgctctagacagcggtaaatacaacgggtacgcccccagtattggatttctctcttcccgcgaagagattgcctcttactaccattgcccagaggcgccactggaagctaaggacgttattctgaccagcggatgctcacaggccatcgacttgtgtctagcagtcctggccaatcccggccagaacattctggtgccacggcccggcttctcattatataaaacactggccgagtccatgggtatcgaagtgaagctgtataatctgcttcctgagaaatcttgggagattgacttgaagcagctcgaatatcttatagatgaaaagacggcctgtttaattgtgaataaccctagcaacccatgcgggtcagtgttcagcaagcgccacttgcagaagattttggcggtcgctgcgagacagtgcgtacccatcttggccgacgaaatatacggagacatggttttctccgattgtaagtacgaacctctggctactctaagcaccgatgtgccaatcctctcatgcggtgggctcgccaaacgctggctcgtgcccggctggaggctgggttggattctcattcatgaccgacgtgacatttttggcaatgagattcgcgacggactggtcaagctgtctcagaggatcctgggcccctgtaccatcgtgcaaggcgctctgaagtccatcctatgcagaacacccggcgaattttatcataataccctcagctttctgaagagcaacgcggatctatgctacggcgctctcgctgccatccccggtctgcggcccgtccgcccatcgggagcgatgtacctaatggtgggtatagaaatggagcactttcctgagtttgagaacgacgtcgagtttacggagaggctcgtcgcagagcagagtgtacattgcctgccagccacatgctttgagtaccccaactttattcgggttgtgatcactgttccagaggttatgatgttggaagcttgttcccgaatccaggaattttgtgagcagcattaccattgcgccgagggcagccaggaggagtgcgacaag

SEQ ID NO: 20754 - DNA, 1362 bp, synthetic construct
  misc_feature 1..1362: note = source = /note="Description of Artificial Sequence: Synthetic coding sequence"
  source 1..1362: mol_type = other DNA
atggacccctacatgattcagatgtcttcaaagggaaacctgccctccatcttggacgtacacgtcaatgtcggtggcaggagcagcgttcctgggaaaatgaaaggccgcaaagcgcgctggagcgtcagacccagcgatatggccaagaagactttcaatcccattcgcgcaatcgtggataatatgaaggtgaagcccaaccctaataagacgatgattagtcttagcattggtgacccaacagtgttcggcaatctaccgaccgaccccgaggtcacacaggccatgaaagacgccctcgacagcggcaaatacaacgggtacgctcccagcatcggttttctgagtagcagggaggaaattgcctcctactatcactgtccagaagctcccctggaggcaaaagatgtgatcctaacctccggctgttctcaggccatcgacttatgtttagctgtgttggctaaccccggtcaaaatattctcgtgccgaggcctgggtttagcctgtacaagaccctggcggagtccatgggcatcgaggttaagctttataacttgctgccggaaaagagttgggagatcgatctgaagcagctcgaatatctgatcgatgagaagacagcttgccttattgtgaataacccctcaaacccgtgtggtagcgtgttttccaagaggcatctgcagaagattctagccgtcgccgcgcgccagtgtgtgcccatcctggcagatgagatctacggcgatatggtgttctcagattgtaagtacgagccactggcgaccctgtcaactgatgtaccaatacttagttgcggtgggttggctaagcggtggttggtgccaggctggcggctgggttggattttgatacacgataggcgagatattttcggcaacgagattcgcgacgggttagttaagctgtctcagaggatactggggccgtgtaccatagtgcagggtgccctaaagtccatcctctgtaggactcccggcgaattttaccacaatacccttagctttcttaaaagcaatgccgatctgtgttatggcgccctcgccgccattccgggcctaaggcccgtccgtccttcaggggctatgtatctgatggtaggcattgagatggaacacttccccgaatttgagaacgacgtggagtttaccgaaagattggtggccgaacagagcgtccattgtctgcccgccacatgttttgagtatccgaactttattcgcgtggtgattaccgtgccggaggtgatgatgctagaggcctgttcgcgcattcaggaattttgtgagcagcattaccactgcgcagaaggttctcaagaggaatgcgataag

SEQ ID NO: 20755 - DNA, 1362 bp, synthetic construct
  misc_feature 1..1362: note = source = /note="Description of Artificial Sequence: Synthetic coding sequence"
  source 1..1362: mol_type = other DNA
atggacccctacatgattcaaatgtctagcaagggcaacttgccctctatcttggacgtccacgtgaatgtgggcgggcgatcttcagttccaggcaagatgaagggacggaaggcacgatggtctgtacgcccgagcgatatggcgaagaagacgttcaaccccattcgtgcgatcgtggacaacatgaaggttaaacctaaccctaacaagacgatgatttcactgtcgatcggcgatccgacggtgttcggaaacctgcccaccgaccctgaggttacgcaagctatgaaggatgcactcgactctggaaaatacaacgggtatgctccgtctatcggcttcctttcttcgcgcgaagagattgccagctactaccactgtcctgaggcgccccttgaggccaaggatgtcatccttacgtccggttgcagccaggccatcgatctgtgtctcgccgtcttggctaaccccggccagaacatcttggtccctcgcccggggttcagcctgtacaagacgcttgcggagtctatgggtatcgaggtcaagctctacaatctgctccctgaaaagtcctgggagattgatcttaagcagctagagtatttgattgatgagaagaccgcctgtcttattgttaacaatccgagcaatccttgtggtagcgtgttcagcaagcgtcatttgcagaagattcttgccgtcgcagcccgacaatgcgtcccgatactggccgatgaaatctacggagacatggtgttctccgattgtaaatacgaacccctggcgactttgagtaccgacgtcccgatcctgagctgtggtggcctcgctaagcgatggcttgttcctggctggcggctaggctggatattgatccacgacaggcgagatatcttcggtaacgagatcagggacggactagtgaagctgtcgcaacgtattctgggtccgtgtacaatcgtgcagggggcgcttaagtctattttatgccgcacccccggtgagttctaccacaataccctgtcctttcttaaatccaacgccgatttgtgctacggcgcccttgccgcgatccctggccttcgccctgtccgcccctcgggtgccatgtacctcatggtggggatcgagatggagcactttccggaattcgagaacgacgttgaattcactgagcgacttgtcgccgagcagagcgtgcattgccttccagccacttgttttgagtaccccaactttatccgggtagtcatcacggtgccggaagtcatgatgttagaggcctgcagccgcatccaggagttctgcgagcagcactatcactgtgctgaaggcagccaggaggagtgcgataag

SEQ ID NO: 20756 - DNA, 1362 bp, synthetic construct
  misc_feature 1..1362: note = source = /note="Description of Artificial Sequence: Synthetic coding sequence"
  source 1..1362: mol_type = other DNA
atggatccttatatgatccagatgtcatccaagggcaatctaccgtctatcttggacgtgcacgtgaatgttggcggcaggtcctctgtgccgggaaagatgaaagggaggaaggccaggtggtcagtgcgtccctctgacatggccaaaaaaacctttaatcccattagggcaatcgtggacaatatgaaggttaagcctaaccccaataaaacaatgatttctctttccataggagaccccaccgtgttcggaaacctcccgacagaccccgaagtgactcaagcaatgaaagatgcactggactccggaaagtataatggctatgcaccatctatcggtttcctgtcttcaagggaagagatagcttcttattaccactgccctgaggctcccctggaagcgaaggacgttatcctgactagtggctgttcacaggccatcgatctctgtctcgccgtgctggcaaatccaggtcaaaacatcctggtgcctcgcccgggcttttctctatataagactctcgctgagtccatggggatcgaggtgaagctgtacaatttgctcccagagaaatcttgggagattgacctaaaacagctagagtacctgatagacgaaaagaccgcctgcctcatcgtgaataatccaagtaacccttgcggttccgtgttctccaagagacatcttcagaagatcctggcggtggccgcgcgacagtgcgtcccaattctcgcagacgaaatatacggcgacatggttttttctgactgcaagtatgaacccctggccactctatccacagatgtccccatcttgtcttgcggcggtctggctaaaaggtggctagtcccaggctggcgtctaggctggatactgatccatgacagacgagacatcttcggcaatgaaatcagggacggcctggtgaagctgtcccaacgtatcctcgggccttgtactatcgtgcaaggagccctgaagagtatcctctgcaggacacccggagaattctatcataacacactgtccttcctgaagtctaacgcagatctatgctatggagcactcgccgctattcctggtctaaggccagtgcgtccaagcggagccatgtatttgatggttggcatcgaaatggagcattttccagagtttgaaaacgatgtcgaatttactgaaaggttggtcgccgagcagtctgttcattgtttaccggccacatgttttgaataccctaactttattagggtagtgataaccgtaccagaggtgatgatgctggaagcgtgctccagaattcaagaattttgcgaacagcattaccactgtgccgaaggatctcaggaagaatgcgacaaa

SEQ ID NO: 20757 - DNA, 1362 bp, synthetic construct
  misc_feature 1..1362: note = source = /note="Description of Artificial Sequence: Synthetic coding sequence"
  source 1..1362: mol_type = other DNA
atggatccttatatgattcaaatgagttctaagggaaatttaccatcaattttggatgtgcatgttaatgtgggaggtagatcatcagttccaggaaaaatgaaaggaagaaaagctagatggagtgtcagaccatcagatatggcaaaaaaaacattcaatcctataagagcaattgttgataatatgaaagttaagccaaatccaaataaaactatgatctctttaagtataggagatccaacagtttttggaaatcttccaactgatcctgaagttacacaagcaatgaaagatgcattagattctggaaaatataatggatatgcaccatctattggatttttatcttcaagagaggaaattgcttcatattatcattgtccagaagcaccattagaagctaaagatgtaattttaacttctggatgttcacaagctatagatttatgtttagcagttttagcaaatccaggacaaaatattttagttccaagacctggattctctttatataaaactcttgctgaaagtatgggtattgaagttaaattatataatttattaccagaaaagtcttgggaaattgatttaaaacaattagaatacttgattgatgagaaaactgcatgtttaattgttaataatccaagtaatccatgtggatctgtattctcaaaaagacatcttcaaaaaattttagctgtcgcagctaggcaatgtgtacctattttggctgatgaaatttatggagatatggtattctctgattgtaaatatgaaccacttgccacgttatctactgatgttcctatattatcttgtggtggtcttgcaaaaagatggcttgttccaggttggaggttaggatggattttgatccatgatcgtagagacatatttgggaatgaaattagagatggacttgttaaactttctcaaagaatcttgggtccatgtactattgtacaaggagcacttaaatcaatcttatgcaggacacctggagaattttatcataatacactttctttcttaaaatctaatgctgatttatgttacggagcacttgcagcaattccaggtctcagaccagttagacctagtggagctatgtatttaatggtaggaattgaaatggaacattttccagaatttgagaatgatgttgaatttactgaaagattagtagcagaacaatctgttcattgtttaccagctacatgttttgaatatccaaattttattagagttgtgatcacagtcccagaagttatgatgcttgaagcttgttcaagaattcaagaattttgtgaacaacattatcattgtgcagaaggttcacaagaagaatgtgataaa

SEQ ID NO: 20758 - DNA, 1362 bp, synthetic construct
  misc_feature 1..1362: note = source = /note="Description of Artificial Sequence: Synthetic coding sequence"
  source 1..1362: mol_type = other DNA
atggatccgtacatgatccaaatgtcctcgaaggggaatctgccgtcaatcctggatgtgcacgtcaacgtcggcggacggagcagcgtgcctggtaaaatgaagggtcgcaaggcccggtggtcggtcagaccaagcgacatggcaaagaaaaccttcaatcctatccgcgccattgttgataatatgaaggtgaagccgaatcctaacaaaactatgatctccctcagcattggagatcccaccgtgttcggaaacctcccgaccgatccagaggtgactcaggcaatgaaggacgcactggactccggaaagtataacggatacgctccttccatcggtttcctgtcgtcacgggaagaaatcgcgtcatactaccattgtccagaggctccgctggaggccaaggacgtgatccttacttctggatgctcgcaagcgatcgacctttgtctggccgtgctggctaaccctggacagaatatcctggtcccaagaccagggttctcactgtacaaaactctcgcagaaagcatgggcatcgaagttaagttgtacaatctcctccctgagaaatcctgggagatcgacctgaagcagctggagtacctcatcgacgaaaagacggcctgcctcatcgtgaacaacccatccaacccctgtggatcagtgttcagcaaacgtcatctgcagaagatactggccgtcgccgcccgccaatgcgtgccgatcttggcggatgagatctacggtgacatggtctttagcgactgcaagtacgaaccgctcgcgaccctctccaccgatgtgccgattctttcgtgcggaggccttgccaagcggtggctcgtgccaggatggcgcctgggctggatcctgatccacgacagacgagacatcttcggaaatgaaatccgcgatgggttggtcaaactgagccagcgcattctggggccgtgcactatcgtgcagggggccctgaaatcgatcctctgtcggacccctggcgaattctatcataacaccctgtcgtttctgaagtcgaacgctgatctgtgctacggagcgttggccgcaattccgggccttagacccgtgaggccctcaggcgcgatgtacctcatggtgggaatcgagatggaacatttcccagaatttgaaaacgacgtggagttcactgagaggttggtagcagaacagtccgtccactgcctgccggctacgtgcttcgaatacccgaactttatccgcgtcgtgatcaccgtgccggaagtgatgatgctggaggcgtgctcgcggattcaagaattctgcgaacaacactaccactgtgccgagggaagtcaggaggagtgcgacaag

SEQ ID NO: 20759 - DNA, 1599 bp, synthetic construct
  misc_feature 1..1599: note = source = /note="Description of Artificial Sequence: Synthetic coding sequence"
  source 1..1599: mol_type = other DNA
atggccgtcgaaagccagggaggccgaccgcttgtcctcggcctcctgctctgcgtgcttggaccagtggtgtcgcacgccggcaagatcctcctcatccctgtggatggctctcattggctctccatgttgggcgcaatacaacagctccagcaacgtggccatgaaatcgtggtcctcgcaccggatgcgtccctctatatacgtgacggcgctttttacacccttaaaacctaccccgtgccttttcagcgcgaggacgtgaaggagtcgttcgtcagccttgggcataatgtttttgaaaacgactcatttctgcaacgagtgattaagacttacaagaagataaagaaggactctgcaatgctgctttccggatgtagccatcttcttcacaataaggaactgatggcatcgctggctgagtccagctttgacgtgatgctcactgatccgttccttccttgttcccctattgtggcccaatacctcagcctgcctactgtgttcttcctgcatgcactgccgtgctcactggagttcgaggcaacccagtgtccgaacccattttcgtatgtgccacgcccacttagttcgcatagcgaccacatgacgttccttcaaagagtgaagaacatgctgatcgccttttcgcaaaactttctgtgtgacgtggtttattcgccttacgcgactctcgcctcagaattccttcaacgggaagtcactgtgcaggatctgttgtcgtcagcctcggtgtggctttttcgttcggattttgtgaaggactacccaagaccaatcatgccaaatatggtctttgtcggaggcattaactgtctgcaccagaatccactgtcgcaggaattcgaagcctacattaatgcatctggagagcatggtattgttgtcttttcccttggttccatggtttcggaaattcctgaaaagaaagcaatggcgattgcagatgcactgggcaagatacctcagacggtgctttggagatacaccggcactcgccccagcaaccttgctaacaacaccattcttgtcaagtggctcccccaaaacgatctcctcggacaccccatgacgagggcttttatcactcatgcgggctcgcatggtgtgtacgagtccatttgtaatggagtgcctatggtgatgatgccacttttcggggatcagatggataacgcaaaacgaatggaaactaagggggccggggtgaccctgaacgtcctggagatgaccagtgaggatttggaaaacgcattgaaggccgtgattaatgataagagttacaaggagaacattatgcggctcagctccctgcataaggatcgccctgtggagcctcttgacctggctgtgttttgggttgaatttgtgatgagacataaaggagctcctcatcttcggcccgcggcacacgatctgacctggtaccaataccactccctcgatgtcattggatttctgctggcagtggtcctgactgtcgcattcatcacttttaagtgttgcgcatacggataccgtaagtgcctggggaaaaaaggaagagtgaaaaaggcgcataagtccaagacccac

SEQ ID NO: 20760 - DNA, 1599 bp, synthetic construct
  misc_feature 1..1599: note = source = /note="Description of Artificial Sequence: Synthetic coding sequence"
  source 1..1599: mol_type = other DNA
atggccgtggaatctcaagggggccgtcccttggtgcttggactactgctgtgcgtgctggggcctgttgtaagtcatgctggcaagattctgttgatcccagtcgatggcagccattggcttagcatgcttggcgctatacagcagcttcagcaaagggggcacgaaatcgtggtgctagcaccagacgctagcctctatatcagggatggcgcattctatactttgaagacataccctgtcccgttccaaagggaggatgtgaaagagtcatttgtgtcactcggccataatgtcttcgaaaacgacagttttctgcagagggtgatcaagacctacaaaaagattaagaaggattctgcaatgctgctctccggctgttctcatctgctccacaacaaggaattaatggcatcgctggccgagtcgagtttcgacgtaatgttaacagacccgttcctgccgtgctcgccaatagtcgcacagtacctctcattgcccaccgtgttcttcctgcacgctttaccttgttcactcgaatttgaggcgacgcaatgtccaaatccattctcctatgtaccaaggcctctgtcctcgcatagcgaccacatgacatttttgcagagagtgaagaatatgttgatcgccttctcccagaatttcctgtgcgatgtagtgtacagcccttacgcaactctggcgtctgaatttctgcagagggaagtgacagtgcaggacctgttaagctcagctagtgtgtggctctttcgatccgacttcgtgaaagactatcctagacctatcatgcccaatatggtcttcgtgggtgggatcaactgcctgcatcagaaccctttatctcaagagtttgaagcatacatcaacgcatctggtgaacacggaatcgtcgtgttctcccttggctccatggtcagtgagattcccgaaaagaaagccatggctatagcagatgcgctgggcaagattccccagactgtgttatggagatatacaggcacaaggccaagtaaccttgcaaacaacaccatattggtaaaatggctgccccagaacgaccttctcggacacccgatgacgagagcattcattactcacgctggcagtcacggagtctacgaatccatctgcaacggagtccctatggtgatgatgcctctgtttggggaccagatggacaacgctaaacgaatggagacaaagggtgccggcgttacactcaacgtcctggaaatgactagcgaggatctcgagaatgccttgaaggccgtcataaatgataaaagctacaaggaaaatatcatgcgtctgtcgtcattacacaaggatcggcccgtggaacccctggacctagccgtattctgggtcgagtttgtgatgagacataaaggcgctccgcacctgcgaccagccgctcacgatctgacctggtaccaataccacagcctcgatgtgattgggttcctgctcgccgtcgttctgaccgttgcattcattactttcaaatgttgcgcctacggatatagaaaatgtctggggaagaagggtcgagtgaagaaggctcataagagtaaaacccat

SEQ ID NO: 20761 - DNA, 1599 bp, synthetic construct
  misc_feature 1..1599: note = source = /note="Description of Artificial Sequence: Synthetic coding sequence"
  source 1..1599: mol_type = other DNA
atggcagtggaatcacaggggggcagacctctggtgcttgggctgctgctgtgcgttttgggtccagtggtcagccatgctggaaagatcttgttgatcccagtcgatggctcgcattggctgagcatgctcggggccatccaacagctgcagcaacgcgggcatgaaattgtggtgctggcacccgacgcttcgctgtacattagagacggtgcgttttacaccctgaaaacgtaccctgtcccgttccagagagaggacgtcaaagagtcatttgtgtccctcggccataatgtgtttgagaacgattccttcctgcagcgggtgatcaagacttacaagaagatcaaaaaggattcagctatgctcctgtccggctgctcgcatctgttgcacaacaaggagttgatggccagcctggcggagtccagcttcgacgtgatgctgaccgatccgttcctgccatgctctcccatcgtcgcacagtacctgtcactgccaacggtgttctttctccacgcgctcccgtgctctctcgaatttgaagcaactcaatgcccgaacccgttctcctacgtcccgcgcccattgtcgagccacagcgaccacatgaccttccttcagagagtgaagaatatgctgattgcattttcgcagaacttcctctgcgatgtggtctactcaccctacgccaccctggcgtcagaattcctgcaacgggaagtcaccgtccaggacctcctctcctcggccagcgtgtggctcttccgctccgatttcgtgaaggactacccgcgcccaattatgcctaacatggtgtttgtgggaggcatcaactgcctgcaccagaatccactgtcccaggaattcgaagcctacatcaacgcctccggcgagcacggcattgtggttttctccctgggttccatggtgagcgaaatccctgagaaaaaagccatggccattgctgacgccctggggaaaatccctcagaccgtgctgtggaggtacactggaacgcgccctagcaacctggcgaacaatacgatcttggtcaagtggctgcctcagaatgacctgctggggcatccgatgacgcgcgcattcatcactcatgcgggctcgcacggagtgtacgaatcgatctgcaatggtgtcccgatggtcatgatgccattgtttggagatcagatggacaacgcaaagcggatggaaactaagggggccggagtgacgctcaatgtactggagatgacttccgaggacctcgagaatgcactgaaggccgtgatcaatgacaaaagttacaaggaaaacattatgcggctgagctccctccataaggatagaccagtggagccactggacctggccgtgttctgggtggaattcgtcatgcgccacaagggagcccctcatcttcggccggctgcccatgatctgacttggtaccagtaccactcccttgatgttatcggattcctgctggccgtggtgttgactgtcgcgttcataaccttcaaatgctgtgcttacggataccggaagtgcctcggaaaaaagggaagggtcaaaaaggctcacaaaagcaagacgcac

SEQ ID NO: 20762 - DNA, 1599 bp, synthetic construct
  misc_feature 1..1599: note = source = /note="Description of Artificial Sequence: Synthetic coding sequence"
  source 1..1599: mol_type = other DNA
atggccgtcgagtcgcaaggaggtcgcccactggtgctgggacttctgctctgcgtgctcggccctgtcgtgtctcacgcagggaagatcctgcttatcccagttgatggatcgcattggctctccatgctgggagccattcagcaactgcagcaaagagggcatgagattgtagtcctggccccggatgcatcactttacatccgtgacggagcgttctataccctcaagacctaccccgtgccattccagcgggaagatgtcaaggaatcctttgtgtccctgggacacaacgtctttgaaaacgattcctttcttcaacgcgtgatcaagacctacaagaagattaagaaggattcggcaatgcttctgtcggggtgtagccaccttctccacaataaggaacttatggcttccctggcagaatccagcttcgatgtgatgctcactgatccattcctcccttgctcccctatcgtggcgcaatacctgagccttcctaccgtgttcttcctgcacgcgctcccttgcagccttgagtttgaagcaacccaatgccctaacccattttcgtacgtccccagacccttgagctcacattccgatcatatgacgtttctgcagcgggtcaagaatatgcttatcgcattttcccaaaactttctttgtgatgtggtctactccccttacgccacgctggcttcggaattcttgcagagagaggtgaccgtccaggatctgttgtccagcgccagtgtctggctgtttagatccgattttgtcaaagattatcctcgtccaattatgcctaatatggtctttgtgggtgggattaactgtctgcatcagaatccgctttcccaagaattcgaagcatacattaacgccagcggagaacatggaattgtggtgttcagcttgggatcaatggtgtccgagatccctgagaagaaagcgatggctatcgcagacgcactgggtaagattccgcagactgtcctgtggaggtacaccggtacgcggccgtccaatctggcaaacaatactatactggtgaagtggctgccccagaacgatctcctgggtcaccctatgactcgcgctttcataactcatgcagggtcgcatggagtctatgaatcgatttgcaacggagtgcctatggtcatgatgcctctctttggcgaccaaatggataatgcaaagcggatggaaactaagggagccggggtcacccttaatgtgctggagatgacttcagaggaccttgaaaatgcgcttaaagccgtcatcaacgacaaatcgtacaaggagaatatcatgcgcctttcctcgctgcataaggaccgtcctgtggagcctctggatctcgcagtgttctgggtggaatttgtgatgagacataaaggagcccctcatctgcgcccagcagcccatgatcttacctggtaccagtaccacagccttgatgtgatcggttttcttctggcggtggtgcttaccgtggcatttatcacctttaagtgttgtgcgtacggatacagaaagtgccttggtaagaagggtcgcgtgaagaaggctcataagagcaaaacccac

SEQ ID NO: 20763 - DNA, 1599 bp, synthetic construct
  misc_feature 1..1599: note = source = /note="Description of Artificial Sequence: Synthetic coding sequence"
  source 1..1599: mol_type = other DNA
atggccgtggaaagtcagggcggaagacccttagtgttgggcctgctgttatgcgtactcggtcccgtcgtttctcacgcaggcaagatcctgctgataccggtggacggctctcattggctttcgatgcttggcgctattcaacagctgcaacagagaggacacgaaatcgtcgtgttagccccagacgcctctctgtatatcagggacggagctttttacacacttaagacctatcctgtgccttttcagcgcgaggacgtgaaggagtctttcgtgtctttgggtcacaatgtattcgaaaacgattcttttcttcaacgcgtcattaagacctacaaaaaaatcaagaaagattcagccatgctactgtctggatgcagccacctcctccataataaggagctgatggcaagcctggctgagtcgagttttgacgttatgttgacagatccttttctgccctgcagccccatcgtggcgcagtacctctctctgcctactgtcttcttcttgcacgcgctaccttgtagtcttgaattcgaggctacccaatgtccaaacccgtttagttacgtgccacggcctctttccagccacagcgaccacatgaccttcctgcagagggtcaagaatatgttgatcgccttcagccagaatttcctgtgtgacgtagtctatagcccttacgccaccctggcaagcgagttccttcaaagggaagttacagtacaggatctattatctagcgccagcgtatggctcttccggagcgatttcgtgaaagactatcccaggcctatcatgccgaacatggttttcgtgggcggcatcaattgtctgcatcagaaccctcttagccaggaatttgaggcctacatcaatgcaagcggtgagcatggcatcgtggtattttcccttggctcaatggtgagcgagatacccgagaagaaggcaatggcaatagcagatgcgttggggaagatcccccagacagtactgtggaggtatacaggaactcggcctagcaaccttgccaacaacaccatactcgtgaagtggctgccacaaaacgatctgctaggccatcctatgactagggctttcatcactcacgctggttctcatggagtgtacgaatctatctgcaacggcgtacccatggtgatgatgccacttttcggtgatcaaatggataacgctaaacgtatggagacaaagggagctggcgtgacgctcaatgtcttagagatgacttcagaagacctggagaacgctcttaaggccgtgatcaatgataaaagctacaaagagaacattatgcggctttctagcctacacaaggataggccagtggagccccttgatctggcagtgttttgggtggagttcgtgatgagacacaagggcgctccacacctgcgcccggcggctcacgatctgacttggtatcaataccacagcctggatgttatcggcttcctgctggccgtggtgctgacagttgcatttatcaccttcaagtgctgtgcgtatggctacagaaagtgcctgggaaagaaaggcagggtaaaaaaagcccataaatccaagacccat

SEQ ID NO: 20764 - DNA, 1599 bp, synthetic construct
  misc_feature 1..1599: note = source = /note="Description of Artificial Sequence: Synthetic coding sequence"
  source 1..1599: mol_type = other DNA
atggcagtggagagccagggcgggcgcccactcgtccttggcctgctgctctgtgtgttgggtcctgtggtcagtcatgcaggcaagatactgctgattcctgtggatggatcacattggctgtcaatgctgggggccattcagcaacttcaacagcgcgggcatgaaattgtcgtccttgccccagatgcatccctttacattcgtgacggagcattttacaccctgaaaacttaccctgtgccatttcaacgagaggatgtcaaagaatcctttgtctccctgggacacaacgtgttcgaaaacgattctttcctgcaacgcgtgattaagacctacaagaaaatcaagaaagattctgcgatgcttttgtcgggatgttcccatctgcttcacaataaagaacttatggcctcactggcagagtcctccttcgatgtcatgctcactgatccattcctgccatgttcacccattgtcgcgcagtacctgtcacttccgaccgtcttttttctccacgcccttccgtgttcgctggagtttgaggctacccagtgccccaacccgttctcatacgtcccccgccctctgagcagccatagcgaccatatgacctttctccaacgcgtgaagaacatgctgattgcattttcgcaaaactttctgtgtgacgtggtgtacagcccttacgccactctcgcatccgaatttctgcaaagagaggtgaccgtgcaagatcttcttagctcggcatcagtttggctctttcggtccgactttgtgaaagattaccctaggccaattatgccgaacatggtgttcgtgggaggaattaactgtctgcatcagaatcccttgtcgcaagaatttgaagcatacattaacgcctcgggcgaacatggtattgtggtcttttcgctgggttccatggtgtcagaaattcctgaaaagaaggcaatggcgattgccgatgcacttgggaaaataccacagaccgtgctttggagatacaccggaaccagaccttcgaatttggcaaataacaccatccttgtcaaatggctgccacaaaatgaccttcttggccatcccatgacccgagcattcatcactcacgccggttcccatggcgtttacgaatcgatttgtaatggagtgcctatggtgatgatgcctctgtttggggatcagatggataatgcaaaacgcatggagacgaaaggagcaggggtcactctgaatgtcctggaaatgacctccgaggacctggaaaacgccctgaaggcagtcatcaacgataaatcgtataaggaaaacatcatgaggctttcgtcactccataaagacagacctgtcgaacctctcgacttggccgtgttttgggtggaatttgtcatgcggcacaaaggagcaccacatctgcgacccgcagctcatgaccttacttggtaccagtaccactccttggacgtcattggatttctgcttgcggtcgttcttaccgtcgcgtttatcaccttcaaatgttgtgcttatggctaccgcaaatgcctgggaaagaagggacgcgtgaaaaaggcgcacaagagcaagactcac

SEQ ID NO: 20765 - DNA, 1599 bp, synthetic construct
  misc_feature 1..1599: note = source = /note="Description of Artificial Sequence: Synthetic coding sequence"
  source 1..1599: mol_type = other DNA
atggcagttgagtcacagggagggagaccattggttctgggccttctgttatgcgtgctggggccagtggtctcccatgccggcaagattctactgataccggtcgacggctcgcactggttaagcatgttaggcgccatacagcagctccagcagaggggacatgagatcgtcgttcttgctccagatgccagcttgtacataagagatggcgctttttacacactgaagacatatccagtgccgtttcagcgagaagatgtcaaagagagtttcgtcagccttggccacaacgtgtttgagaacgattccttcctgcagagggtcattaagacttacaaaaaaattaagaaggactcagcaatgttactgtccggttgctctcacctcttgcataataaagagttgatggcttctctggccgagagttcttttgatgtaatgttgacagatccattcctgccatgctctcctatcgtggctcaatatctatcattacccactgtgttctttctccacgcccttccttgctccttagagttcgaggccacacagtgtccaaaccccttttcctatgtgcctcggccattgagcagccactcagaccacatgacttttctccagagggtaaaaaatatgctcatcgcttttagccagaatttcctgtgtgacgtggtctatagcccctatgccaccctggccagtgagttcttacaaagggaggtcacggtgcaagacttattaagtagcgcatctgtgtggctgtttaggtcagactttgtcaaagattaccctcgaccaatcatgcctaatatggtttttgtcggagggattaactgcctacatcagaatcccttgagccaggagtttgaggcctatatcaatgcctctggcgaacacggaatcgttgtgttttcgctcggttccatggtgagtgaaatccctgagaagaaggctatggcgatcgctgatgccctgggaaaaataccacagacggtgctctggcgctacaccggcactcgcccatctaacctagcaaataataccatcctggttaagtggcttccgcagaacgacttgctagggcatccgatgactagggcctttattacccatgccggctctcacggcgtctacgagtcaatctgtaatggggtgccaatggtaatgatgcccctgttcggagatcagatggataatgcaaaaagaatggagacaaagggagcaggggttacattgaacgtgcttgagatgacctcagaggatttagagaacgcactgaaagctgtgatcaatgacaagtcgtataaagagaatatcatgcgcttgtcttctttgcataaagatcgcccggtggagcccctagatctggcggtcttttgggtggagttcgtaatgcggcacaagggggcgcctcacctgcgcccagcagctcatgacttaacctggtatcagtaccacagtctagatgtcatcggttttctgctggcggtcgtcttaaccgtcgcattcatcactttcaaatgctgcgcctacggctaccgcaagtgtcttgggaaaaaagggcgtgtgaaaaaagcgcacaaatcgaaaactcac

SEQ ID NO: 20766 - DNA, 1599 bp, synthetic construct
  misc_feature 1..1599: note = source = /note="Description of Artificial Sequence: Synthetic coding sequence"
  source 1..1599: mol_type = other DNA
atggctgtcgagtcacagggaggtaggccactggttttagggttattgctgtgcgtcttgggcccggtcgtctcacacgccgggaagatcctgcttatacccgttgacggtagccactggctctctatgttaggcgctattcagcaacttcagcagcggggtcatgagattgtggtgctcgctcccgacgctagtctgtacatccgcgatggggctttctatactttaaaaacatatcccgttcccttccagcgggaagacgtgaaggaatcttttgtgagcctagggcataacgtctttgagaacgactcttttctccagagagtgattaaaacatataagaagatcaagaaagattcagccatgcttctttccggctgcagccacctgctgcataacaaggagctgatggcctcactggctgagagctcttttgatgtgatgctgactgatccatttttaccctgttctccaatcgtcgctcagtacctcagtcttcccacagtattcttcctacacgcgctcccttgtagcttagaattcgaggccacacagtgtcctaatccctttagctacgttcccagaccgctctcctctcattctgaccatatgacattcctgcaacgggtcaagaatatgctcatcgctttctcacagaattttctgtgcgacgtggtgtacagtccctatgcaacactggccagcgaatttctgcagagagaggtcacagtgcaggacctgctgagctcggcttccgtgtggctctttagatctgatttcgtcaaagactaccctcggcccattatgcctaacatggtcttcgttggcggcatcaactgcctccaccagaaccctctctcccaggaattcgaagcttacataaacgcctcaggcgaacatggcattgtagttttcagcttgggcagtatggtgtccgaaatccctgagaagaaggctatggccattgccgatgcgctaggtaagattcctcagacagtgctgtggcgctacaccgggactcgaccttccaacttagccaacaatactatcctggttaagtggttgccacagaacgacctcctcggtcacccgatgaccagggcattcatcacccacgcggggagtcatggcgtctacgaaagcatttgtaatggggtgcccatggtcatgatgcctctgttcggcgatcagatggacaacgccaaacggatggagaccaagggcgcaggtgtaactctaaacgtgctggagatgaccagtgaggacctggagaacgcgcttaaggctgtcattaatgataaatcttataaagaaaacattatgcgtttgtctagcttgcacaaggaccgccctgtggagcccctagatctcgcggtgttttgggtagaattcgtcatgcgccacaaaggagccccccatttgcggcccgctgcgcatgacttaacgtggtatcaatatcattccttggacgtaatcggattcctgctggccgtagtgctcaccgtggcttttataacgttcaagtgttgtgcttacgggtaccggaaatgcctgggaaagaagggaagggttaagaaggcccataagtccaaaactcac

SEQ ID NO: 20767 - DNA, 1599 bp, synthetic construct
  misc_feature 1..1599: note = source = /note="Description of Artificial Sequence: Synthetic coding sequence"
  source 1..1599: mol_type = other DNA
atggcagtggagtcccagggcggtcgtcccctggtgctcggtttgctgctctgcgtcttgggccctgtggttagccacgctggcaaaattctgttgattcctgtggatgggagtcactggttatcaatgctaggcgcaatacagcagctacagcaacgtgggcatgaaatcgttgtcctggcaccagacgcgtcactctatattagggacggcgccttttacactttgaaaacataccccgtgccgttccagagggaggatgtgaaagaatccttcgtttcgctgggtcacaatgtttttgagaatgactcattcctccaacgcgtgataaaaacgtataagaaaattaaaaaggattcagcgatgcttctaagtgggtgctctcacctgctccacaataaggagttgatggcgagtctggccgagagcagcttcgatgtaatgctgactgaccctttccttccgtgctccccgattgttgcacagtatctctccctgccgaccgttttcttcctacacgctctgccatgctctttagaatttgaggcaacccagtgcccaaacccattttcttacgtccctcgccccctctccagtcattccgatcacatgactttcctccagagagtaaagaacatgctcatcgccttttcgcaaaatttcctgtgtgatgttgtttattcgccctacgccactcttgcaagtgaatttttgcagcgagaggttaccgtacaagatttgcttagttctgcatcagtttggctgttcaggtcggatttcgtcaaagattacccacgccccattatgcctaatatggtgtttgtgggggggatcaattgtctccaccagaacccactgagtcaagagtttgaggcttatattaacgcaagcggcgagcacggaattgtcgtgttcagcctagggtccatggtttcagagattccagaaaagaaagccatggcgatcgcagatgccctaggtaaaataccccagacagttttatggagatatacaggaacccggccatctaacctcgctaacaataccatccttgttaagtggcttccacagaatgatctgctaggccaccctatgacacgcgcgttcatcactcatgcagggtcgcatggggtttatgaatctatctgtaacggggtgcccatggttatgatgccactcttcggagaccaaatggacaacgctaagagaatggaaacgaagggcgcgggcgttactctgaatgtcttggagatgacatcggaggatttggagaacgctcttaaggccgttatcaacgataagagctataaggagaacattatgcgattgtcatcactacacaaggacagacctgtggaacctttagaccttgctgtgttttgggtcgaattcgtgatgaggcacaagggggcaccacacctgagacctgctgcacatgacctaacatggtaccagtatcacagtctggacgtcattggattcctgctcgccgttgtgctgaccgtcgcgtttattacttttaagtgctgtgcgtacggatatagaaagtgtctgggcaagaagggacgcgttaaaaaggcgcacaagtctaaaacacat

SEQ ID NO: 20768 - DNA, 1599 bp, synthetic construct
  misc_feature 1..1599: note = source = /note="Description of Artificial Sequence: Synthetic coding sequence"
  source 1..1599: mol_type = other DNA
atggcagtggaaagccaaggaggacgacctctggtgctcggtctgctcctgtgtgtgctgggccctgtcgtgtcccacgcgggcaagatattgctgatcccagtggatggatcccattggctttcgatgctgggtgcaattcagcagctgcagcagaggggacatgagatcgtggtcttggcccccgacgccagcctttacatcagggacggggctttttacactctgaaaacttaccctgtcccttttcaaagggaggacgtcaaggagagctttgtgtcgctgggacataacgtgttcgaaaacgattcattcctgcaacgggtcatcaaaacctacaagaaaatcaaaaaggactccgcgatgctgcttagcggatgctcccatcttctgcacaataaagagcttatggcgtcccttgcagaatcctcgttcgacgtgatgctgacggatccgttcctgccttgcagccctattgtcgcgcaatacctgagcctccctaccgtgttctttctgcatgctctgccttgttcgctggagtttgaggccacccaatgcccaaacccattttcatacgttccacgcccactctcgtcgcattccgatcacatgactttcctgcagcgggtgaaaaacatgctcattgccttctcgcagaatttcctttgtgatgtggtttattctccctacgctacgctggcatccgaatttctgcagcgcgaggtgaccgtgcaggatctgctttccagcgcttcggtctggcttttcagaagcgattttgtgaaggattacccccggcctattatgcccaacatggtctttgtgggaggtattaactgtctgcatcaaaatccgttgtcccaagaatttgaggcttacatcaacgcatccggagagcatgggattgtggtgttttcgctcggatcgatggtgtcagaaattcctgagaaaaaggcgatggcaatcgctgatgcactcggcaaaattcctcaaactgtactttggcggtacactggaacccgcccttcaaatcttgccaataacactatactggtgaagtggctcccccagaacgatcttctggggcatccaatgactcgggcgttcataacccatgcaggatcgcatggcgtgtacgaatccatctgtaatggtgtgcctatggtcatgatgccactgtttggagatcaaatggataacgccaaacgtatggaaaccaagggggcgggtgtcacccttaatgtgttggaaatgacctccgaagatttggagaacgcgcttaaggcagtcattaacgacaagagctacaaggaaaacattatgcgactgtctagcctgcataaagacagaccagtggaaccacttgaccttgcggtgttctgggtggaattcgtgatgagacataagggagcccctcatctgcggccagcagcccatgacctgacttggtaccagtaccattccctggatgtgattgggttccttctggccgtggtgcttactgtggcattcattacgtttaagtgttgcgcatacggatacagaaaatgtcttgggaagaaggggcgggtcaaaaaggcacataagtctaagacgcat

SEQ ID NO: 20769 - DNA, 1599 bp, synthetic construct
  misc_feature 1..1599: note = source = /note="Description of Artificial Sequence: Synthetic coding sequence"
  source 1..1599: mol_type = other DNA
atggccgtggagagtcaggggggcagacccttggtgctgggtctgctcttgtgcgtgttgggccctgttgtatctcacgccggcaagattctcctcatacctgtggacgggtcacattggctttcaatgctgggggccattcagcagctgcaacagagagggcatgaaatcgtggtcctggctccggatgcttctctttacatacgagatggagctttctacactctgaaaacatatccggtcccctttcagagggaggacgtaaaggagtccttcgtgagcctgggacacaacgtctttgaaaatgatagtttcctgcagcgcgtgattaaaacgtacaagaagatcaaaaaggatagtgccatgctcctctccggttgcagccaccttctgcacaataaggaactcatggcctcattggccgagtccagcttcgacgtgatgctgactgacccctttctgccatgctctcccattgttgcacaatatctttctctgccgacagtgttcttcctgcacgcgctcccctgcagcctcgaatttgaggccacccaatgtccgaatccgttttcatacgtcccacgaccactgagcagccacagtgaccacatgacttttctgcagagggtcaaaaacatgttgatcgcgttctctcaaaattttctctgtgacgtggtctacagcccctatgccaccctcgctagtgaatttctgcagagagaggttacagttcaggatctgcttagctcagcctcagtttggttgttcaggtctgattttgttaaggactatcccaggcccatcatgccaaacatggtgtttgtgggcggtattaattgcctgcaccagaacccgctctcacaagagtttgaggcatatatcaatgcaagtggcgagcacggcatcgtggtcttcagcctcgggtctatggtcagcgaaatccctgagaagaaggcaatggcaattgccgatgccctgggcaagattccgcagacagtgctgtggcgatacactggaacaaggccctctaatctggcaaataacactatcctcgttaaatggctgccacagaatgacctgcttggccatcccatgacacgggcctttattacccacgcaggcagtcatggcgtgtatgagagtatttgcaacggggtccccatggtgatgatgccccttttcggcgaccaaatggataacgcaaagagaatggaaaccaaaggcgctggtgttacccttaatgtgctggagatgacaagtgaggacctggagaatgctctcaaggctgttataaatgataagtcttacaaggaaaatatcatgagactgtcctctctgcacaaggatagacctgtcgagccgttggacctggcagttttctgggtcgaattcgtcatgaggcataaaggcgctccgcatctgcggccagcggctcacgacctgacatggtaccagtaccacagcctcgacgttataggcttcctgctcgccgtggtgttgaccgtggcattcatcaccttcaagtgttgcgcttatggctatcgaaaatgcctgggcaagaaagggagggtcaagaaggcgcacaaatccaagactcac

SEQ ID NO: 20770 - DNA, 1599 bp, synthetic construct
  misc_feature 1..1599: note = source = /note="Description of Artificial Sequence: Synthetic coding sequence"
  source 1..1599: mol_type = other DNA
atggcggttgaatcacagggcgggcgacccttggtcctcggactccttctctgcgtgctggggcctgtagtcagccatgcaggaaaaatattattaatcccggttgatgggtcccactggttgtctatgctcggcgcaatccagcaactacagcagcgcggccacgaaattgtcgtccttgctcccgatgcatcgctatatatccgggatggcgctttctacaccttaaagacatatccggtgcccttccaacgcgaagacgtaaaagaatccttcgtgtcgctaggtcacaacgtgttcgagaatgatagctttctgcagcgggtcatcaaaacgtataaaaagattaagaaagatagtgccatgctcttgtcaggatgttctcacctgctgcataataaggagctcatggcttcactcgctgagtcctctttcgatgtgatgctgacggaccctttcttaccctgctcacctattgtggcgcagtatctctcgctgccaacagtgttctttttacacgcactgccttgtagcctcgaatttgaggccactcaatgcccgaaccctttctcgtatgtgcccagaccactttcatcacactctgaccacatgacgtttctgcagcgcgtgaaaaacatgctcatcgctttcagccaaaacttcttgtgcgacgttgtgtattccccatatgctacactcgcttccgagttcttgcagcgcgaggtcactgtgcaggatctgctcagttccgcctcagtgtggctgtttcgatctgacttcgttaaagactaccctcgacctatcatgccaaacatggttttcgttgggggcatcaactgtctgcaccagaaccctcttagtcaggagttcgaagcgtatattaacgcctccggagaacatggtatcgtggttttttccctgggcagcatggtcagcgagattccagagaagaaagccatggccatagcagatgccttaggaaagataccccagaccgtgctgtggcggtacaccggcactaggccaagcaatctcgccaacaatactatcctggtgaagtggctgccacagaatgacctgctcggccatcctatgactagggcctttataacccatgccgggtcccacggagtctatgagtcaatctgcaacggagtgccgatggtgatgatgccgctatttggcgatcagatggataatgccaaacgcatggaaacaaagggggccggcgtaacgttaaacgtactggagatgacatccgaagacttggaaaatgctttaaaagcagtgattaatgacaaaagctacaaagagaatatcatgagactgtccagtctgcataaggaccgtcctgttgagccgctcgatttggcggtcttttgggttgagtttgttatgaggcacaaaggggcccctcacttacgaccggccgctcacgatctgacatggtatcagtatcattctctcgacgtgattggtttcctacttgctgtggtactgacggtcgcattcattacgttcaaatgctgtgcgtacggataccgaaaatgtcttggtaagaagggcagagtcaagaaagcccacaagtcgaagacccat

SEQ ID NO: 20771 - DNA, 1599 bp, synthetic construct
  misc_feature 1..1599: note = source = /note="Description of Artificial Sequence: Synthetic coding sequence"
  source 1..1599: mol_type = other DNA
atggccgtcgaatctcaaggagggagaccattagtcctaggattgcttctttgtgtgctggggcctgtggtctcacacgccggaaagatcctcctcatcccagtcgatggttcccactggttgtctatgctcggcgctattcagcaactgcagcagcgggggcacgaaatcgtggtcctggctccggatgcatcactctacatcagggatggtgctttctacacactcaaaacctaccctgttccttttcagagggaggatgtcaaggaaagtttcgtctctcttgggcacaatgtttttgagaacgactctttcctgcaacgagttattaaaacttacaaaaaaatcaaaaaggactcagccatgttgttgagcggatgttcacacttgctccacaacaaagagctcatggccagtctggccgagagctcctttgacgtgatgctgaccgacccttttcttccttgttcccccatagtagcccagtatctgtctcttcccacggttttctttcttcacgccctgccatgctccctggagtttgaagccacacaatgtcccaaccctttttcctatgtgccacgccccctgtcttcacacagcgatcacatgactttcctgcagcgggtgaaaaacatgctgatagctttcagccagaattttctgtgtgatgtcgtatacagcccatacgcaacactggcatctgaattcttgcagcgggaggtgacagttcaagacctcctgtcctctgccagtgtttggttgttcaggtccgactttgttaaggactatcccagacctattatgccaaacatggtttttgtgggcgggataaattgcctgcatcagaaccccctgagccaggaattcgaagcgtatatcaacgcatccggagagcacggcatagtagtgttctccctcggctcaatggtctccgagattcctgagaagaaggctatggccatcgctgatgccctgggcaaaataccacagaccgttctgtggcgctataccgggacacggccaagtaatctggcaaacaataccatcctggtgaagtggctcccacagaacgatttactgggacatcccatgacaagggctttcatcactcatgcgggtagccacggagtgtacgagtccatctgcaacggggtccccatggtgatgatgccactgttcggcgatcagatggacaacgcgaagcgcatggaaacgaagggagccggggtgacccttaacgtgcttgagatgactagcgaggatctcgaaaatgctttaaaagccgttataaatgacaaaagttacaaggagaacataatgcgtctgtctagtcttcataaggaccgccctgttgaacctctagatctggctgtgttttgggttgagttcgtgatgcgccacaagggggccccacacttgagaccagcagcgcatgacttgacatggtaccagtatcatagccttgacgtgattgggttcctactagctgtagtgctgactgttgccttcataacgttcaaatgttgcgcctacggatatcgaaagtgcctgggcaagaaaggaagagttaagaaggcccataaaagtaagactcac

SEQ ID NO: 20772 - DNA, 1599 bp, synthetic construct
  misc_feature 1..1599: note = source = /note="Description of Artificial Sequence: Synthetic coding sequence"
  source 1..1599: mol_type = other DNA
atggcagtcgaatcgcaaggtggacgccccctcgtgcttggtttgctgctttgtgtgctcggaccagtcgtgtcgcacgccggtaagatccttcttattcctgtggatggttcgcattggctgtcaatgcttggtgcaatacagcagttgcagcagcgcggccacgaaattgttgtcctggcaccagatgcgtcgctctacattcgagacggagcgttttacacccttaaaacctacccagtgccattccagcgagaggatgtgaaagagtcattcgtgtcgcttggtcacaacgtctttgaaaacgattcgtttctccaaagagtgattaagacttacaaaaagatcaagaaagattcagcgatgctcctgtcgggttgtagccacctcctgcacaataaggagctgatggcttcactcgccgaatcctcatttgatgtgatgcttactgacccgtttctgccttgctcgccaattgtggcacaatacttgtcactccctaccgtgttttttcttcacgcattgccatgttccctggaattcgaagcaactcagtgccccaacccattttcttacgtccctagacctctgagctcacatagcgatcatatgacctttctgcagagagttaagaacatgctgatcgcctttagccaaaactttctgtgcgacgtggtgtacagcccgtacgccactttggcgtcagagtttctgcagcgggaagtgacggtccaagatctcctctcgagcgcatccgtgtggctttttcgatccgattttgtgaaggactaccccaggcccattatgcccaatatggttttcgttggcggaattaactgcctgcaccagaatccgctttcacaggaatttgaagcatacattaatgcatcgggcgaacacggcattgttgtgttctcactgggctcaatggtatccgagattcccgagaagaaggcgatggcaattgcagatgcattgggaaagattcctcaaactgtgctgtggcgctacaccggtactcggcctagtaatcttgccaataacaccatccttgtcaagtggctccctcaaaacgatctgctggggcatcctatgactcgggcgtttatcacccacgccggtagccatggagtgtacgaaagcatttgtaatggtgtcccgatggtgatgatgccactttttggcgaccagatggataatgcaaaaaggatggaaactaagggtgcaggagtcaccctcaacgtgcttgagatgacgtcagaagatttggaaaacgctcttaaggccgtgattaatgacaagtcgtacaaggaaaacatcatgaggcttagctcactccataaggatcggcccgtggaacctttggatctggccgtcttttgggtcgagtttgtgatgcgccataaaggagcgcctcacctcagaccagccgctcatgatctgacgtggtatcagtaccatagccttgatgtgattggattcttgcttgcggtggtgctgaccgtggcattcataactttcaaatgttgtgcatacggctacaggaagtgtctgggtaagaaggggagagtgaagaaggcacataagtcgaaaacccac

SEQ ID NO: 20773 - DNA, 1599 bp, synthetic construct
  misc_feature 1..1599: note = source = /note="Description of Artificial Sequence: Synthetic coding sequence"
  source 1..1599: mol_type = other DNA
atggctgtcgagtcccaaggaggtcgaccacttgtcctaggtttgcttctgtgcgtgcttgggcctgtcgtgtcccatgcgggaaagattctactgatccccgttgatggatcacactggctctcaatgcttggggccattcaacagcttcagcaacgcggccacgaaatcgtcgtcttggcccccgacgcctctctttatatcagagacggggcattttataccctgaagacatatcccgtccccttccagcgcgaagatgtcaaggagtcattcgttagtctaggacacaacgtgtttgaaaatgatagctttttgcagcgcgtcatcaagacctacaaaaagattaagaaggattcagcaatgttactgtctggttgttcccatcttctgcacaacaaagaattgatggcgtccctagcggagtcgtccttcgacgttatgctgaccgacccttttttgccatgtagtcctatcgttgcacagtacttatccctgccgacagtgttcttcctccacgcacttccatgcagtctcgagttcgaggcgacgcagtgcccaaatccgttctcatacgttccgagaccattgagctcgcattctgatcatatgacgttcctgcaaagagtgaagaatatgctaatagcattctctcagaatttcttatgcgatgttgtttattctccgtacgccaccttggcatccgagtttcttcaacgagaagttacggttcaggatctactctcaagtgcttcggtctggctcttccggtcagacttcgtcaaggactatccacgacctattatgcctaatatggtatttgttggcgggattaattgcctccaccagaacccactttctcaagagttcgaggcatatattaacgcgagcggtgagcatggcattgttgtgttctcgctgggaagtatggtgagtgaaatccctgaaaaaaaggctatggccatcgctgacgctttaggtaagatcccacagacggtcctgtggcggtatactggaactagaccttcgaacttggcaaacaacacgattcttgttaagtggctaccgcagaatgacctgttgggtcatcccatgacccgggcgttcataacgcatgccggctcgcatggcgtttacgaaagtatctgcaacggcgtgcctatggtgatgatgccgctttttggagatcaaatggacaacgcaaagcgaatggagacgaagggcgccggcgtaacccttaacgtcctagagatgaccagcgaggacctggagaatgccctaaaagcggtaataaacgataagtcgtataaggagaatattatgcgtctctcatccttgcacaaggaccgcccagttgagccactcgatttggccgttttctgggtcgaatttgttatgcggcacaagggggcgccacacctcagacccgctgcccacgacctcacttggtatcagtaccattccctggatgtcatcggattcctgctggcagtggtgctaaccgtggcattcatcacattcaaatgctgcgcctatggatataggaagtgcctcggaaagaagggtcgcgtaaagaaagcgcataagagtaaaacccat

SEQ ID NO: 20774 - DNA, 1599 bp, synthetic construct
  misc_feature 1..1599: note = source = /note="Description of Artificial Sequence: Synthetic coding sequence"
  source 1..1599: mol_type = other DNA
atggccgtggagagccaaggtgggcgccctcttgtgctgggactgctgctctgcgtgctgggtcctgtcgtgtcccacgctggaaagatcctccttatcccggtcgacggatcccactggctgtcgatgctgggagctattcaacaactgcagcaaagaggacatgaaatcgttgtgttggcccctgacgcgtcattgtacatccgggatggggccttttacactcttaagacttatccagtgccgttccagagagaagatgtgaaggaatcattcgtgtcattgggtcacaatgtctttgagaacgattcattccttcagcgggttatcaagacgtacaagaaaatcaagaaagattcggccatgctcctctccggctgctcccacctgctgcacaacaaggagctgatggccagcctggcggaatccagctttgacgtcatgctgaccgacccttttctgccttgctcaccgatcgtcgcccagtacctctccctgccgactgtgttcttcctccacgcactgccatgcagcttggagttcgaagcgacgcagtgtccgaaccctttctcgtacgtgcctagaccactgtccagccattcagaccacatgaccttcctccaaagagtgaagaatatgctgatcgctttctcgcagaatttcttgtgcgacgttgtgtacagcccgtacgcgaccctggcctcggagttcctccagcgcgaggtgaccgtccaggacctcctgtcgtctgcgtcagtctggctcttcaggagcgacttcgtgaaggactaccctcgcccaatcatgccgaatatggtgttcgtgggaggtatcaactgtctgcatcaaaacccgctgtcccaggagtttgaagcctacatcaatgcaagcggagagcacggcatcgtcgtattcagccttggatccatggtttccgaaataccggaaaagaaggcaatggctatcgctgacgccctgggtaagatcccgcagaccgtgctgtggaggtacactggaacccgcccctccaacctggctaacaacactatcctcgtgaagtggctgccacaaaacgacctcttgggacacccaatgactcgcgccttcattactcacgcaggttcgcacggggtgtacgaatcaatctgcaacggcgtgcccatggtcatgatgcctctgttcggtgatcagatggacaatgccaagcgcatggaaaccaagggtgccggtgtgaccctgaacgtgctggaaatgacttccgaagatttggagaacgcactgaaggctgtcatcaatgataagtcgtacaaagagaacatcatgagactcagctccttgcataaggaccggcccgtggaaccgctcgacctggccgtgttctgggtggagttcgtgatgcggcacaagggagcgccacacctccgccctgccgcccacgatttgacctggtaccaataccactcgctcgacgttatcggattcctgctcgcagtggtgctgactgtggctttcatcaccttcaagtgctgcgcctacggataccgcaagtgcctgggaaagaaaggaagggtcaagaaggcgcacaagagcaaaacccac

SEQ ID NO: 20775 - DNA, 1599 bp, synthetic construct
  misc_feature 1..1599: note = source = /note="Description of Artificial Sequence: Synthetic coding sequence"
  source 1..1599: mol_type = other DNA
atggccgtagagtcacagggaggacggcccctggtattgggactgttactctgtgttcttgggccagtggtctcccatgccggaaaaattttactcatccctgtcgatgggtctcactggctctctatgctcggagcaatccagcagttgcagcagaggggacatgaaatcgtggttctggcccccgatgcgagtctctatatccgggatggagcattttatactctcaagacatatcctgtcccctttcagcgcgaagatgtcaaagagtcttttgtctccctaggacataatgtgttcgaaaacgatagtttcctgcagcgcgtcatcaaaacttataaaaaaataaaaaaagactctgctatgctcttatctggatgctcacatctgcttcacaacaaagagctcatggcctctctcgcagaaagtagttttgatgtcatgttgactgacccctttctcccctgttcacccatcgtagcccagtatctctctttaccaacggtctttttcttacacgctctaccctgctccctcgaatttgaggctacacagtgtccaaaccccttttcatacgtccccagacccctctcttctcatagtgaccacatgacattcctccagagagtgaaaaacatgctcatcgctttttcacagaatttcctctgtgatgtggtgtatagtccctacgctactctcgcttccgaattcctgcagagggaagtgactgtgcaggatcttttgtcctccgcatctgtgtggctctttcggtctgatttcgttaaagactacccaagacccattatgcccaacatggtgttcgttggagggatcaattgcctacaccagaatccattgtcccaggagttcgaagcttatataaatgcaagtggagaacatggaatcgtcgtgttttcactcgggagtatggtttccgaaatccctgaaaaaaaagccatggctattgctgacgctcttgggaaaataccccagactgtactttggcggtacactggaactaggccctccaacctagccaacaatactatcctagtaaagtggttgccccagaatgatctgctcgggcatccaatgacacgcgcattcatcactcacgccggatctcacggggtttatgaaagtatctgtaacggagttccaatggtcatgatgccactcttcggggatcagatggataatgccaaacgcatggaaacaaagggagcaggagtaacactcaacgtcttagaaatgacttcagaagatcttgaaaatgctctgaaggcagtcatcaacgataaatcttataaagagaacatcatgcgtctgtcttccctgcacaaagatcggccagtggaaccacttgatttggctgtgttttgggtggaatttgtcatgcgccataaaggagccccacacctaaggcccgccgcccacgatctgacttggtatcagtatcactctttagatgtgatagggttcctgcttgctgtcgttctgactgtggcttttattacattcaaatgttgtgcttatgggtacaggaaatgtcttgggaaaaaagggagagtcaaaaaagcccataaatccaagacacac

SEQ ID NO: 20776 - DNA, 1599 bp, synthetic construct
  misc_feature 1..1599: note = source = /note="Description of Artificial Sequence: Synthetic coding sequence"
  source 1..1599: mol_type = other DNA
atggccgtggaatcccagggtggacggccgctcgtgttgggactgctgctgtgcgtcctgggaccggttgtttcccatgctggaaagatcctcctcatcccggttgatggctcacactggctctccatgctgggagctatacagcagctgcagcaacgcggacacgaaattgtggtgttggcgccagacgctagcttgtacattagggacggcgccttctacaccctgaaaacttatccggtgcctttccaaagagaggatgtgaaagagtcattcgtgagcctgggacataacgtctttgaaaacgattcgttccttcagcgggtgatcaagacctacaagaagatcaagaaggattccgccatgcttctttcgggatgtagccatctgctccacaacaaggagttgatggcgagcctcgccgagtcatctttcgatgtcatgctcaccgaccctttcctgccgtgctcccccatcgtggcccagtatctgtcccttccaaccgtgttcttcctgcacgcactcccttgcagcctggaattcgaggccacccagtgccctaaccccttttcatacgtcccccggccattgtcgtcccactccgaccacatgaccttccttcagagagtgaagaatatgctgatcgcgttctcgcaaaactttctctgcgacgtggtctactcaccgtacgccaccctggctagcgagttcctgcagagagaagtcactgtgcaagacctcctgtcatcggccagtgtgtggttgttccggtcagatttcgtgaaagattatccacgccctataatgccaaacatggtgtttgtgggtggcatcaattgcctccatcagaatccactgtcacaagaattcgaagcatacatcaacgcctccggtgagcacggaatcgtggttttctcgctggggagtatggtgtcggaaatcccggagaagaaggcaatggctattgcggatgccctgggcaagattccacaaactgtgctgtggcgctacactggaaccagaccttccaatcttgccaacaacactatcctcgtgaagtggctgcctcagaatgaccttctcgggcacccgatgactagggcttttatcactcatgctggtagccacggtgtgtacgagagcatctgtaatggcgtgccgatggtgatgatgccgttgtttggggaccagatggataatgcgaagaggatggaaacgaaaggcgcgggggtcaccctgaacgtgctggagatgacgtcggaggatctggaaaacgcacttaaggcggtgattaacgacaagagttacaaggaaaacattatgagattgtcatcattgcacaaagaccgccctgtcgaacctctcgacctggctgtgttttgggtcgagttcgtcatgcggcataagggtgcgcctcatctgcgcccggccgctcatgaccttacctggtaccaataccactcgctcgacgtgatcggattcctgctggcggtggtactgaccgtagcattcattaccttcaagtgctgtgcctacggatacagaaagtgcctcggaaagaaaggacgagtcaaaaaagcccataagtcgaaaactcac

SEQ ID NO: 20777 - DNA, 1599 bp, synthetic construct
  misc_feature 1..1599: note = source = /note="Description of Artificial Sequence: Synthetic coding sequence"
  source 1..1599: mol_type = other DNA
atggctgttgaatcacaggggggcagaccgttggtcctcggcttgctcctttgcgttctgggacctgtggtgtcacacgcgggtaagattttgttgattccagtcgacgggtctcactggctttccatgcttggggctatccaacagctccagcagagaggtcacgaaatcgttgtgcttgccccagacgcctcattgtacatccgggacggagcgttttacacactgaagacgtaccctgttccatttcagagggaagacgtcaaggagagcttcgtatccttgggccataacgtgtttgagaacgactccttcctgcagagggtgatcaagacatataagaagatcaagaaggactccgcgatgttactctctgggtgttcccatctactgcataacaaggaacttatggctagcctggctgaatcaagttttgatgtgatgctgaccgacccgtttttaccctgctcccccatcgtagctcaatatcttagcctgcctactgtcttcttcctgcatgcactaccctgttccctggaatttgaggcaacacagtgtcccaatcccttttcttacgtgccaaggccactaagcagtcactccgaccacatgactttcttgcagagggtaaagaacatgctgattgctttctcacaaaacttcctttgtgatgtcgtgtacagcccttatgcaacactagcctccgaatttttgcaaagagaggtgactgtgcaggatttgctgtcaagcgcctctgtgtggctattccggtctgattttgtgaaggattaccccagaccaatcatgcccaatatggtgttcgtgggcgggattaattgtcttcaccagaatcccttgtcccaggaatttgaggcatatattaatgcctctggggaacacggcatagtcgtcttcagcctgggttccatggtgtcagaaatacccgagaaaaaggcaatggccatcgcggacgcactgggaaagattccccaaaccgtgctttggcggtacacaggcacacgcccatccaacctggccaacaatactatccttgtgaagtggctgccccagaatgatctacttgggcatccaatgacacgggccttcataacgcacgcgggttcccatggggtgtacgagtctatttgtaacggagtgccaatggttatgatgcccctctttggcgatcagatggataatgcaaagaggatggagacaaaaggcgcaggcgtgactctcaacgtcctagagatgacaagcgaagatctagagaatgccctgaaggccgtgatcaatgataagagctacaaagagaacatcatgagactctcttctctgcataaggatcgtcctgttgagcccctcgatctggcggtgttttgggtggagttcgtaatgagacacaagggggcccctcacctccgcccagcagcacatgatctcacctggtatcagtaccacagtctggacgtcatcggatttctgctcgcagtggtgcttaccgtcgcttttatcacttttaagtgttgcgcgtatggctacaggaaatgcttggggaagaagggaagagtcaagaaagcccacaaatcaaaaacgcac

SEQ ID NO: 20778 - DNA, 1599 bp, synthetic construct
  misc_feature 1..1599: note = source = /note="Description of Artificial Sequence: Synthetic coding sequence"
  source 1..1599: mol_type = other DNA
atggccgtggaatcgcagggcggtagaccgctggtgttgggactcctcctctgcgtgctcggaccagtggtcagccacgccggaaagatcttgctcattccagtggatgggagccactggctgtcgatgctcggtgctatccagcaattgcaacaaaggggacacgaaatcgtcgtgctggccccggacgcaagcctgtacatccgggacggggcattctacaccctcaaaacttacccagtccctttccagcgggaggacgttaaggagagctttgtgagcctgggacataacgtgtttgaaaatgattcattcctgcagcgcgtgatcaagacttacaaaaagatcaagaaagatagcgcaatgctgctgtccggctgttcccacctgttgcataacaaagaactgatggcctccctcgccgaaagttcattcgacgtgatgctcactgacccgttcctgccttgctcgcctatcgtcgcccagtacctctccctgcctactgtgtttttcctgcacgcgctgccatgcagtctggaatttgaagccactcagtgtcctaatcctttctcatacgtcccgcggccactgtcctcacattcagatcacatgactttcctccagcgcgttaagaacatgctgatcgcatttagccagaacttcctgtgcgacgtggtgtactcgccgtacgcaactttggcgtccgaattcctccagagagaagtgacggtccaggatctcttgagctccgcctcggtgtggctctttcgcagcgatttcgtgaaagactacccgcgtccgatcatgccaaacatggttttcgtcggtgggatcaattgcctgcaccagaacccgctgtcacaggaattcgaagcctacataaacgcgtccggggaacacggcatcgtcgtgttttccctgggctccatggtgtccgagatcccagaaaagaaggccatggcgatcgcggacgctctcgggaagatcccgcagaccgtcctgtggagatacactggcacccggccgtcgaacctcgcgaacaatactatcctggtcaagtggctgccgcaaaatgacctgctcggacaccccatgaccagagcgttcatcacgcacgcaggatcacacggagtgtatgagtcgatctgcaacggtgtgcctatggtgatgatgccgttgttcggcgaccagatggataatgccaagcgcatggaaaccaaaggagcaggggtgaccctcaatgtgctcgagatgacgtcagaggatctggagaacgccctgaaggctgtgatcaacgacaaatcgtacaaggaaaatatcatgcggctctcgtccctgcataaggatagacccgtggaaccgctggatttggcagtgttctgggtcgaattcgttatgcggcacaagggagccccacacctgcgcccggctgcgcatgatttgacctggtatcagtaccattcgctggacgtcatcggattcttgctcgccgtcgtcctgaccgtggcttttatcactttcaagtgttgcgcgtacggatacaggaagtgcctgggaaagaaaggaagagtgaaaaaggcccataagtcaaagacgcac

SEQ ID NO: 20779 - DNA, 1599 bp, synthetic construct
  misc_feature 1..1599: note = source = /note="Description of Artificial Sequence: Synthetic coding sequence"
  source 1..1599: mol_type = other DNA
atggcggtggaatcacaaggtggtcggccgcttgtgctgggcttgctgctgtgcgtgctgggaccggtcgtttcccacgcaggaaagatactcctgatccccgtggacgggtcccattggttgtccatgctgggcgcgatccagcaattgcaacagagggggcatgagatcgtcgtcctcgccccagacgcctccctgtacattcgagacggagccttctacacgctgaaaacctaccctgtgccatttcaacgcgaggacgtgaaggagtcttttgtgtccttgggccacaacgttttcgaaaatgactcctttctgcagagagtgatcaagacttacaagaaaatcaaaaaggattcggccatgctgttgtccggatgtagccacctcctgcacaacaaagaactgatggcttccctggcagaatcctccttcgacgtcatgctgaccgatccgttcctgccatgctcgccgatcgtggcccagtacttgtcactgccgaccgtgttcttcctgcacgctctcccatgctcgctggaatttgaggccacccagtgcccaaacccgttcagctatgtgccccgccctctctcttcacactcggaccacatgaccttcctgcagcgggttaagaacatgttgatcgctttcagccagaattttctgtgcgacgtcgtctactcgccctacgctactcttgcatccgaattcctccagcgggaagtgactgtgcaggacctcttgtcctctgcatccgtgtggctgtttcgctcggattttgtgaaggattaccctcggccgatcatgccgaatatggttttcgtcggtggaatcaattgcctgcaccagaatccactgtcccaggaatttgaagcgtacattaacgcctcaggggaacatggaatcgtggttttcagcctgggctcgatggtgtcagagatccccgaaaagaaggcgatggccatagcagacgcactcggaaagattccgcagactgtgctgtggcgctacactggaactagaccgtccaatctggccaataacacgatcctcgtgaaatggctcccacaaaacgatctgctgggacaccctatgacccgggcattcatcacccacgctggatcccacggagtgtatgagtctatctgcaacggagtgccaatggtcatgatgcccctgttcggggatcaaatggacaacgcgaaaagaatggagactaagggagcgggggtgaccctcaatgtgctggagatgacttcagaggaccttgaaaacgcgctcaaagccgtgatcaacgacaaatcatacaaggaaaacatcatgaggctctccagcttgcataaagaccgccctgttgagccgttggatctcgcagtgttctgggtggagttcgtgatgcgtcacaagggagcaccacatctgcgaccagctgcacatgacctgacttggtaccaataccatagccttgatgtcatcggcttcctgctggcggtggtcctgaccgtggccttcatcaccttcaagtgttgcgcctatggctaccgcaaatgtctgggcaagaagggaagggtgaagaaggcgcataaaagcaagacccat

SEQ ID NO: 20780 - DNA, 1599 bp, synthetic construct
  misc_feature 1..1599: note = source = /note="Description of Artificial Sequence: Synthetic coding sequence"
  source 1..1599: mol_type = other DNA
atggccgtggaatcgcaaggtggacgacccctggtgctgggactgcttttgtgcgtccttggacccgtggtgtcgcacgctggcaaaattcttctgatccctgtggatggatcccattggctctccatgctcggagccattcagcagcttcagcaacgcggacatgaaattgtcgtcctggctccagacgcatctctgtacatacgagacggagccttctatactctcaagacctacccagtgccgtttcaaagagaagatgtgaaggagagcttcgtgtcgttgggccacaatgtgttcgaaaacgattcctttctgcaaagggtgatcaagacctacaagaagattaagaaggatagcgcaatgctgctgagcggatgctcgcatcttctgcacaataaggaactgatggcatcgctcgcagagtcgtcatttgacgtgatgctcactgacccttttcttccttgttcccctatcgtggcccagtacctgagccttccaactgtgtttttcctgcacgcacttccatgtagcctcgaatttgaggcaactcaatgcccgaaccctttttcctacgtccctaggccactctcatcgcattctgaccacatgacgtttcttcagcgagtgaagaatatgctgatcgcattctcccagaactttctctgtgatgtggtgtactccccatacgcaacgctcgcatcagagttcctgcaacgggaagttaccgtgcaggatctcttgtccagcgcgagcgtgtggctctttagatctgattttgtgaaggattaccccagacctattatgccgaatatggttttcgtgggcggtataaactgtttgcatcaaaatccattgtcgcaagagttcgaggcttacatcaatgcgtcaggagagcacgggatcgttgtgttttcgttgggttccatggttagcgaaattccagaaaagaaagccatggctatcgcagatgcacttggcaagattccgcaaacggttctttggagatacactggtaccagaccttctaatcttgcaaataacactatccttgtgaagtggcttccacagaacgatctcctgggtcatccaatgactagggcatttatcacccatgcaggatcccacggcgtctacgagtcaatctgtaatggcgtgcctatggtgatgatgcctctctttggtgatcagatggacaacgctaagcgtatggaaaccaaaggggcgggtgtgaccctcaatgtgctcgaaatgaccagtgaggaccttgaaaacgcactgaaagccgtgataaacgataagtcatacaaagagaacataatgcgtttgagctccctgcataaggatagacctgtcgaacctctggacctcgcggtcttttgggtggaattcgtcatgagacataagggagctccacaccttcggccggcggcccacgatttgacgtggtaccagtaccattcccttgatgtgattggttttcttttggcagtggtgcttacggtcgcgttcataacttttaagtgttgtgcatacggatatagaaagtgcctggggaagaagggtcgtgtgaaaaaggcgcataagtctaagactcat

SEQ ID NO: 20781 - DNA, 1599 bp, synthetic construct
  misc_feature 1..1599: note = source = /note="Description of Artificial Sequence: Synthetic coding sequence"
  source 1..1599: mol_type = other DNA
atggcagtggagtcgcaaggcgggcgccctctggtcctcgggctgctgctgtgcgttctggggccagtggtgtcccatgctggcaagattcttcttataccagttgatgggagccactggctgtccatgctgggcgctatccaacagctgcagcagcgtggacatgagatcgtcgttctggccccggatgcatctctatacattagggatggtgcattttataccctgaaaacctatcccgtcccattccaaagagaggacgtgaaggagtcattcgtgtccttagggcataatgtgttcgagaacgatagtttcttacagagagtgataaagacatacaaaaagattaaaaaggactcggctatgctgttgtccggatgcagtcatctcttgcacaacaaagaactgatggctagcctcgcagaatcttctttcgatgtgatgctcacagacccattcctcccatgttcccctattgtcgctcagtacctgtccctccccacagtgtttttcctccatgcattaccatgttccctggaatttgaagccacacagtgcccaaatccattctcgtatgtcccaaggcccttatctagccatagtgatcacatgaccttcctccaacgggtgaaaaacatgcttatcgcttttagtcagaatttcttatgcgatgtcgtttactccccttatgctaccctggcatctgagttcctgcaaagggaagtgacggtgcaggatctactgtcctccgcatccgtttggttattcaggtcagattttgtgaaagactatccacgcccgatcatgccgaacatggttttcgtggggggcattaattgcctccatcaaaacccactgtcacaggagtttgaagcgtacattaatgcgtccggcgaacacgggatcgtggtgttcagtctgggctctatggttagcgagattcccgaaaaaaaggccatggctatcgctgacgctctgggaaaaatcccccagactgttctctggagatacacaggcacccggccttccaatttggcgaacaacacaattctcgtcaagtggctcccacagaacgatctgctggggcacccaatgacacgcgcctttatcacccatgcaggctctcacggcgtctatgaaagtatttgtaacggcgtccctatggttatgatgcccttattcggggatcaaatggacaacgcgaagcggatggagacaaagggtgcgggggtcaccctgaatgtgctggaaatgacctccgaggatctagaaaacgcgctcaaagccgttattaacgacaaaagctataaagagaatatcatgaggctgtcctctctgcacaaagatagacccgtggagcccctggacttagcggttttttgggtcgagtttgtgatgcggcacaaaggcgcgcctcatctgaggccagccgcccatgacctgacatggtaccagtatcacagccttgacgtgatcggcttcctcctcgctgtcgtcctgaccgtggcttttatcacgtttaaatgctgtgcttatggctaccggaaatgcctgggcaagaagggtcgagtgaagaaggcgcacaaatccaaaactcat

SEQ ID NO: 20782 - DNA, 1599 bp, synthetic construct
  misc_feature 1..1599: note = source = /note="Description of Artificial Sequence: Synthetic coding sequence"
  source 1..1599: mol_type = other DNA
atggctgtagagtcgcagggcggcagaccactggtgctggggctgttgctctgcgtgctaggcccagtggttagtcacgccggcaagattttactgatcccagttgacggctctcactggctgagcatgctaggagcgattcagcaactgcagcagcgggggcacgaaatagttgttctcgcccccgacgcgagcctctatatcagggacggggccttttacacactaaagacctatcccgtgccattccaacgggaagacgtgaaagagtcatttgtctcactcgggcacaacgtttttgaaaatgactccttcctgcaacgggtgatcaagacctacaaaaagattaagaaggattcagccatgttgcttagcggatgctctcacctgttacataataaggagttgatggcatccttggctgaatcgtcatttgacgtcatgctgacagaccctttccttccatgttcgcctatagtggctcagtacctgtccctgccgacagtgttcttcctgcatgccctgccttgctcgttagaattcgaagccacgcagtgcccaaatccttttagctatgtgccgcgtcccctgagttcgcattccgatcacatgacatttctgcaacgagttaaaaatatgctgattgccttttctcagaacttcctctgtgatgtggtgtattcaccttacgcaacgctggccagcgaatttctgcagcgcgaggtcaccgttcaggatctgcttagctctgcttctgtctggctttttagaagtgactttgtgaaggattatccccgccctatcatgcctaatatggtgttcgtggggggcattaactgtctgcaccagaacccactcagccaggaattcgaagcctacattaatgccagtggcgagcacgggatcgtggttttctcgttgggatccatggtttctgaaatacccgagaagaaggctatggccatcgctgatgctctggggaaaataccacagaccgtactgtggcgttataccggaacaagaccctccaacctcgcaaataacactatcctggttaagtggttgccccaaaacgacctgctgggacatcccatgacgagggctttcatcacacatgccggctctcacggcgtgtatgaaagcatctgcaatggcgtccccatggtgatgatgcccctgtttggcgaccagatggacaatgccaagcgaatggagacaaagggcgccggcgttacattgaatgttttggagatgacctccgaagacctggagaatgccctgaaggcagtgatcaacgataaaagctataaggaaaatatcatgaggctgagtagtcttcataaagataggccagttgagccactggatctagcagtcttctgggtggagtttgtgatgcggcacaaaggcgctcctcatctgcggcccgcagcccacgaccttacctggtaccagtatcacagcctagacgttattgggtttctgcttgctgtggtattgacagtggctttcattactttcaagtgctgcgcctacggttatagaaagtgtctaggcaagaaaggacgcgtgaaaaaggcccacaagagcaaaacccac

SEQ ID NO: 20783 - DNA, 1599 bp, synthetic construct
  misc_feature 1..1599: note = source = /note="Description of Artificial Sequence: Synthetic coding sequence"
  source 1..1599: mol_type = other DNA
atggcagtggagtcacagggtggacggccgcttgttctgggccttcttctctgcgtgctgggcccggtcgtgtcacacgccgggaagattctgctgattcctgttgatggttcgcactggctgtccatgttgggggccattcagcaactccaacagaggggtcacgagatcgtggtcctggcccctgatgcatccctgtacatccgagatggagcgttctataccctgaaaacttacccggttccattccagcgagaggacgtgaaggaatcctttgtgagcctcggacataacgtgttcgagaacgactcgttcctgcagcgtgtgatcaaaacttacaagaagatcaagaaagatagtgcgatgctcctgagtggatgctcccatctcctccacaacaaggagcttatggcctccctcgctgagtcgtcattcgacgtgatgctgaccgatcctttcctgccgtgttcacctatagtcgcacagtacctgagcctgccaaccgtgttctttctccacgcgctcccttgctctctggaattcgaggctacccagtgtcccaatccgttttcctacgtcccacggcccctctcctcccattcagatcacatgaccttcctccagagagtcaagaacatgcttatcgccttctcccagaacttcctgtgtgacgtggtctacagcccctacgcaaccctggctagcgaattccttcaacgcgaggtgactgtgcaagacctgttgtcgtcggctagcgtctggctgtttcgttctgatttcgtgaaggactatccccggccgatcatgcccaacatggtgttcgtcggcggaatcaattgcctgcatcagaatcctttgtcgcaagaattcgaagcctacatcaatgcgtccggggaacatggaatcgtggtgttcagcctggggagcatggtgtccgaaattccagaaaagaaggctatggccatcgcggatgccctggggaaaatcccgcaaaccgtgctctggcgttataccggaactagaccatcgaatctggcgaacaataccatcttggtgaagtggctgccccaaaatgacttgctgggacatccaatgacgcgcgcctttatcactcatgcaggatcgcacggagtctacgagtccatttgcaatggagtgccaatggtcatgatgccactgtttggggatcagatggacaacgcaaaacgcatggaaactaagggagccggagtcacgctgaacgtactcgagatgacttcagaggacctcgaaaatgccctgaaggctgtcatcaacgataagtcgtacaaggagaacatcatgcggctctcatcactgcacaaagacagacctgtcgaaccgttggacctcgctgtgttctgggtggagttcgtcatgcggcacaagggcgccccgcacctgcgcccggcggcacacgatctcacttggtaccagtaccatagcctcgacgtgatcggattcctgcttgccgtcgtgctcacggtcgcgtttatcacttttaagtgctgcgcgtacggctatagaaagtgcctcggcaagaagggacgcgtcaagaaagctcataaatcaaagactcac

SEQ ID NO: 20784 - DNA, 1599 bp, synthetic construct
  misc_feature 1..1599: note = source = /note="Description of Artificial Sequence: Synthetic coding sequence"
  source 1..1599: mol_type = other DNA
atggccgtggaatcgcagggaggtagacccctggtgctgggcctgctgctttgcgtgctcggaccagtggtttctcacgcagggaagattctgctcatcccggtcgatggaagccactggctgtctatgctgggggctatccagcagctccaacagagaggacacgaaatcgtcgtcctcgctccggacgcatcactctacatccgggatggggctttctacacgctgaaaacctaccctgtgcctttccaacgcgaagatgtgaaagagtcattcgtgtccctcggtcataatgtgttcgaaaacgactcattcctgcagcgcgtcatcaaaacctacaagaagatcaagaaagattcggccatgcttctgagcggatgctcgcacctgctgcacaataaggagcttatggcctccctcgcggagagctcattcgacgtgatgctcaccgatccttttttgccttgttccccaatcgtcgctcaatacttgtctctgccgaccgtgttctttctccacgccctgccctgctcactggaatttgaggcgacccagtgccccaacccgtttagctatgttccgcggccgttgtcatcccattccgatcacatgacgtttctccaacgggtcaagaacatgctgattgcattctcccagaacttcctctgcgacgtcgtgtacagcccgtatgcaactttggcctcagaattcttgcaaagggaagtgactgtgcaggacctgctgagctctgcctcggtgtggctgttcaggtcggattttgtcaaagactacccacgaccgatcatgccaaatatggttttcgtcggaggaattaactgtctccaccagaacccgctttcccaagagttcgaggcctacatcaacgcatcaggagaacacggaatcgtggtgttctcgcttggatcgatggtttccgaaatcccggagaagaaggcgatggctatcgccgacgccctgggtaaaatcccacaaaccgtgttgtggagatacactggaacgcgcccatcaaatctggcgaacaatactatccttgtcaaatggctgccccagaacgatttgcttgggcacccgatgaccagggcgttcatcacccacgcgggatctcatggcgtgtatgaatctatctgcaacggcgtgccaatggtcatgatgcccctgttcggcgaccagatggacaatgccaagcgcatggagactaaaggtgcaggagtgaccctgaatgtgctggagatgacctctgaagatctggaaaacgccttgaaggcggtcattaatgataagtcgtacaaagagaacatcatgcgactgtcctcgctgcataaagacagacctgttgaaccccttgacctcgctgtgttttgggtggagttcgtcatgcggcataagggtgcaccgcatcttcggccagctgcccatgacctgacttggtaccagtaccatagccttgacgtgatcggctttctgctggcagtggtgctcacggtggccttcataaccttcaagtgttgcgcctacggctaccggaagtgcctcggtaagaagggacgcgtgaaaaaggcgcataagtccaaaactcac

SEQ ID NO: 20785 - DNA, 1599 bp, synthetic construct
  misc_feature 1..1599: note = source = /note="Description of Artificial Sequence: Synthetic coding sequence"
  source 1..1599: mol_type = other DNA
atggccgtggaatcccagggggggaggccgctcgttcttggactgctcttgtgcgtacttggaccagtggtctctcacgccgggaagattttgcttatcccagttgatggcagtcactggctgagtatgctcggagccattcagcagctccagcagcgaggccacgaaatcgtggttctggctcctgatgctagcttgtacataagggatggagcattttacactctgaagacatacccagtgccttttcagcgggaggacgtcaaagagtcctttgtcagcctaggacacaatgtattcgagaatgactccttcttgcaacgcgttatcaagacctataaaaagatcaagaaggattccgctatgctccttagcgggtgctcgcaccttctccacaacaaggaactgatggcctctctggcggagagctccttcgacgttatgcttacagatccatttctcccgtgctccccaatcgtggcgcaatacctgtccttacccacagtattttttctgcacgccctcccatgcagtcttgaatttgaagctacccagtgccctaatcccttcagttacgttccaaggccgctgtcatcgcactcagatcacatgaccttcctccagcgcgttaaaaacatgctgatcgctttttcccagaattttctgtgcgacgtagtttactcaccttatgccactctcgctagtgaatttctccaacgagaagtgacggtgcaggacctgctatcgtccgcgtcagtctggctgttcaggtccgatttcgttaaagattatcccagacccatcatgccaaacatggtgtttgtcgggggtatcaactgcttacaccagaacccactctcccaagaatttgaagcgtacatcaacgccagcggtgagcacggaattgttgttttttccctcggctccatggtcagtgagatccctgagaagaaggcgatggctatcgccgacgccctggggaagatcccccaaacagtcttatggcgctacactggtaccagaccctctaaccttgctaacaacactatccttgtgaaatggctgcctcaaaatgaccttctggggcacccaatgaccagagcttttatcacccacgctggaagccatggtgtctacgaaagcatttgtaacggggttcccatggttatgatgccgctcttcggcgaccagatggacaacgcaaaacgaatggaaactaaaggggctggagtgaccctaaacgttcttgaaatgacatccgaggaccttgagaacgcattaaaggctgtgattaacgataaatcttataaggagaatataatgaggttgagttcactgcataaggatcggccagtcgagcccctcgaccttgcggtgttttgggttgagtttgtcatgcgtcacaagggcgcccctcacttgagacctgcagcccacgacctgacatggtatcagtaccattctttggatgtcatcgggtttctgttggccgtggttcttaccgtggcctttatcacattcaagtgctgtgcttacggatatagaaaatgcctgggaaaaaagggcagagtgaaaaaagcccacaagagtaagacccat

SEQ ID NO: 20786 - DNA, 1599 bp, synthetic construct
  misc_feature 1..1599: note = source = /note="Description of Artificial Sequence: Synthetic coding sequence"
  source 1..1599: mol_type = other DNA
atggccgtggagtctcagggtggaagacccctggtactcggcctgctcctatgtgtgctcggacctgtcgtgagtcatgcagggaaaatcctgcttatccccgtagatggatctcattggctgtccatgttaggcgcgatccaacagttgcaacagcgaggacacgagatcgtggtgctcgcccccgacgcctcattgtatatccgtgatggtgccttctataccctgaaaacctacccagttcctttccaacgagaggacgtcaaagagagcttcgtatccctagggcataacgtgtttgagaacgattcttttctgcagcgtgtcatcaagacctacaagaaaataaaaaaagattcggcaatgctgctgagcggttgttcccacctattgcacaataaggaactcatggcatctctagccgaatcctcattcgatgttatgctgactgacccgttcttgccctgctcgcccattgtggcccagtatttgtccttaccaaccgttttctttcttcacgccctaccatgttcattggagttcgaagcgacccagtgtccaaatccatttagttacgtccctcggcctctgagctcccattcagaccatatgacttttctgcagcgggtgaagaacatgctgattgcttttagtcaaaattttctgtgtgatgtcgtatactctccttatgctaccctggccagtgagtttctgcagagagaagttacggtgcaggatctcctcagctctgcatccgtttggttatttagatcagattttgtaaaagactatccacgccccattatgccaaacatggtgttcgtggggggtattaattgcctgcaccagaaccctctgagccaggaattcgaggcatacattaacgctagcggggagcacgggatcgtcgtctttagcctggggtctatggtctccgaaattcctgagaagaaggctatggcaatagctgacgcactcggcaaaattccgcaaactgtgctttggcggtataccggcacaaggccatccaatctggccaacaacactatcctggtgaaatggttgccacagaatgacctgctgggccatcccatgactcgagctttcatcactcacgccggcagccatggcgtctatgaatctatatgcaacggtgtccccatggtcatgatgcccctgtttggcgaccagatggataacgctaagaggatggagacaaaaggagccggcgtgactctgaacgtcctcgagatgactagtgaagatctggagaacgcactgaaggcagtgataaatgataaatcctacaaagagaacataatgcgtctctctagcctgcacaaggataggccagttgagcccctcgatttggctgtcttctgggtagagttcgtgatgcgccataaaggtgctccacacctccgtccggctgcgcatgacctgacttggtatcagtatcacagcctagatgtgattggctttctgcttgctgtcgtgctgacagtagctttcatcaccttcaagtgctgtgcatacgggtacagaaagtgtttgggcaaaaagggccgggtgaagaaggcccacaagtccaaaacccac

SEQ ID NO: 20787 - DNA, 1599 bp, synthetic construct
  misc_feature 1..1599: note = source = /note="Description of Artificial Sequence: Synthetic coding sequence"
  source 1..1599: mol_type = other DNA
atggcggtcgaatcccagggtggacggccgctagttctgggactattgctctgcgtgcttggccctgtggtgagccacgcgggcaagattctcctgatcccggtcgacggctcccattggctgtcaatgctcggcgctattcagcagctccagcagcgtggccacgagattgtcgtgttggctccggatgcaagtttgtatattcgtgacggcgcgttttacactctcaagacataccccgttccgtttcaacgcgaagacgtcaaggagagtttcgtttcgttggggcataacgtctttgagaacgactccttcctgcagcgggtgattaagacgtacaagaagattaaaaaggacagcgcaatgctcctgtccggatgcagccatcttttgcataacaaggagctcatggcttctctggccgagtcctctttcgatgtcatgctgacggatcccttccttccgtgttccccgatcgtggcccagtacctcagcctgccgactgtattctttctccatgcattgccctgcagcctcgaattcgaagcaacccaatgcccaaaccctttcagttacgttcctcgccccctttcgtcccattctgaccatatgacgttcttgcaaagggtcaagaacatgctcatcgcgttttcccaaaacttcctctgtgacgtcgtatatagcccgtacgctaccctggcttccgagtttctacaacgcgaagtcacagtgcaagatctgctgtcgtcggcctcggtgtggctcttccgtagtgacttcgtcaaggattacccgcgacccatcatgcctaacatggtcttcgttggcggcattaattgccttcaccagaaccctctgtcccaagagttcgaggcatacattaacgctagcggtgagcacggaattgtagtcttctctctgggttccatggtctctgaaattccagagaagaaggctatggccatcgctgacgctttgggtaagattccccaaacagtcttgtggcgttatactggaactcggccctctaacctggcaaataacactattttggttaagtggctcccccagaatgatctcctgggccacccgatgactcgcgcatttattacacatgctgggtcgcacggtgtgtacgagagtatctgtaacggagtgccgatggtcatgatgccgttgtttggtgaccaaatggataatgccaaacgaatggaaaccaaaggagcgggtgtcaccctgaacgttttggagatgacatctgaagatttggagaacgctttgaaagcagtcatcaatgacaaatcttacaaggagaacatcatgcggctgtccagcctgcacaaggatcgtccagttgagcccctggacttggccgtcttttgggtcgagttcgtcatgcggcacaagggggctccccacctgcgacccgcagcccacgacctcacctggtaccagtatcattccttggacgttatcggttttctgttggccgtggtgctgaccgtcgcgtttataaccttcaagtgctgcgcctacggctatcgtaagtgcctcggtaagaagggacgtgtcaagaaagcgcataaatccaagactcat

SEQ ID NO: 20788 - DNA, 1599 bp, synthetic construct
  misc_feature 1..1599: note = source = /note="Description of Artificial Sequence: Synthetic coding sequence"
  source 1..1599: mol_type = other DNA
atggcagtggagtcacagggggggaggcctctggtacttggactgctgctgtgtgtgttgggtcctgtcgttagccatgcagggaagattctgcttatccccgtagacggcagccactggctgagtatgctgggcgcaattcagcagcttcagcagagaggtcatgaaatcgtggtgctggctccagacgcaagcttgtatatccgggatggcgcgttttacaccctgaaaacatacccagtaccctttcagcgagaggacgtgaaggaaagcttcgtgtccctgggccacaacgtgtttgagaacgactcatttctgcagcgagttattaagacatacaaaaagatcaagaaggatagcgctatgctgctgtccgggtgctctcacctgcttcataacaaggaactgatggcttccctggcggagtcctccttcgatgtgatgcttacagatccgttcctcccatgttcccccatagtggcccaatatctctcactccctaccgtgttctttttgcatgctctgccgtgctcacttgagttcgaagcgacacaatgcccaaacccgttcagctacgtaccacgacccttgagcagtcacagtgaccacatgacatttctgcagagggtgaaaaatatgctcatcgcctttagccagaacttcctgtgtgacgtggtgtactccccatacgcaaccctggctagcgaatttttgcagagggaggtgaccgtgcaggatcttctgagcagtgctagcgtgtggctttttaggtcagattttgtgaaagactatccgagaccaatcatgccaaatatggtgtttgtcggtggaatcaactgcttgcaccagaatccgttgagccaggaattcgaggcctatatcaacgcaagcggagaacacggcatagtagtgttcagcctgggaagcatggtcagcgagattcctgaaaaaaaggcaatggctatagcggacgctctgggtaaaatacctcaaactgtactgtggcgatacactggaacacggccttctaacctcgccaacaatacaatcttggtgaagtggctgcctcagaacgacctcctgggccacccaatgacacgggcctttatcacccacgcaggttcacatggcgtctacgaaagcatttgcaatggggtgccaatggtgatgatgccactcttcggtgatcagatggacaacgctaaacggatggaaaccaagggcgcaggagtcaccctgaacgtgctggaaatgacttcagaggacctggaaaacgctttgaaagctgtgattaacgacaaaagttacaaggagaacatcatgcggttgagtagtttgcacaaggaccgccctgttgaacccctcgacctcgccgtcttctgggtcgaattcgtgatgagacataagggggccccccacctccgcccggccgcacatgatctgacatggtaccaatatcatagccttgatgtgatcggatttctgctcgcagttgtgctgaccgtggctttcataacgtttaaatgttgcgcctatggctatagaaaatgcttggggaaaaaaggtagggtgaagaaagcgcacaagtcaaaaacccac

SEQ ID NO: 20789 - DNA, 1599 bp, synthetic construct
  misc_feature 1..1599: note = source = /note="Description of Artificial Sequence: Synthetic coding sequence"
  source 1..1599: mol_type = other DNA
atggcagtcgagtcccagggtgggcggcccctggtgcttggactgctgctctgtgtgttgggtccagtggtgtctcacgcaggaaagattctgctcataccagtcgatggttcccattggctttccatgttgggtgccattcagcagctccaacagaggggacatgagattgtggtcctggcccctgatgcaagtttgtatatccgtgacggagcattttacactctgaaaacttaccctgtcccattccagcgcgaggatgtcaaggaatcctttgtgtctttgggacataacgtgtttgaaaatgatagcttcctgcaacgagtgattaagacgtacaaaaagataaagaaggattctgcaatgcttctctccggatgcagccatcttctgcataacaaagaacttatggcaagcctggcggaatcatcgtttgacgtgatgctcaccgacccttttttgccatgttcaccaatcgttgcccaatatctgagcctccctactgttttctttcttcatgcactgccctgctccctcgagtttgaggcaactcaatgtccgaatccgttctcatacgtgcctaggcctctgtcatcgcatagcgatcatatgacttttcttcaacgcgtgaagaatatgttgatcgcttttagccagaacttcctttgtgatgtggtgtacagtccatacgccactcttgcaagcgagttcctgcagagagaggtgaccgtgcaggatcttctgtcatcagcctccgtgtggctttttcggtcggacttcgtcaaggactacccccggcctattatgccaaacatggtctttgttggtggtattaactgtctccatcagaacccactgtcacaagaatttgaagcctacatcaatgcatcaggagaacacggtatagtggtcttttctctcggatctatggtgtccgaaatcccagagaagaaggcaatggccatagcagatgcccttggcaaaatccctcaaacggtcctttggagatacactgggacccggccttccaaccttgcgaacaacaccatcctggtcaagtggctccctcaaaatgacctcttgggacaccctatgacgcgggcattcattacccacgcaggctcacacggtgtctatgaatcgatttgtaacggtgtgcccatggtgatgatgccgttgttcggagatcaaatggataatgcgaaacgaatggaaactaagggagccggcgtaaccctgaacgtgctcgaaatgactagcgaggatctcgaaaacgcccttaaggccgtgattaacgacaagagctacaaggagaatatcatgcgcctctcctcacttcataaagacaggcctgtggaacccctggatctggcagtgttttgggtggaattcgtcatgcggcacaaaggcgcaccgcatctccggcccgcggctcatgatctgacctggtaccaataccactccctggatgtgatcggctttctgcttgcagtggtacttacggtggcatttatcactttcaagtgttgtgcatacgggtacaggaagtgtctcggaaagaaaggacgcgtcaagaaggctcataaaagcaaaactcac

SEQ ID NO: 20790 - DNA, 1599 bp, synthetic construct
  misc_feature 1..1599: note = source = /note="Description of Artificial Sequence: Synthetic coding sequence"
  source 1..1599: mol_type = other DNA
atggctgtggagtctcagggcggtcgcccccttgttctaggcctcttactctgtgtgctcggacccgtggtgtcgcacgccgggaaaattctgctcatccctgtggatggcagccactggctcagcatgctgggcgccattcaacagcttcagcagaggggacatgaaatcgtcgtcctggcaccagacgctagtctttacatccgcgacggcgctttctacactctgaaaacctacccggtgcccttccagcgcgaagatgttaaagagtcctttgtgtcactgggccacaatgtgtttgaaaacgactctttcctgcagcgcgtgatcaagacatacaagaagatcaagaaagactcggcgatgcttctgagcgggtgctcccatcttctgcataacaaggagctgatggctagtctcgctgagagctccttcgatgttatgctgacggatccattcctgccatgtagtccgatcgtggctcagtacctgtccctgcctacggtattttttcttcacgccctcccctgctcgctggagttcgaggccacccagtgtcctaaccccttcagctacgtcccacgcccattgtcttctcactctgaccacatgacattcttgcagagagtgaaaaacatgctgatcgccttttctcagaactttctttgtgatgtggtgtatagcccctatgctactctcgcctctgagtttctacagcgtgaagtgaccgtgcaagaccttctatctagcgcttcagtgtggctgtttaggagcgactttgtcaaggactacccccggccaataatgcccaacatggtcttcgtgggcggtattaactgtcttcaccagaacccattgtcacaggagtttgaggcatatattaatgcatcgggggagcatggcattgttgtattctcactcggatccatggtgtctgaaattcctgagaagaaggctatggctatagctgatgcactcggcaagatcccccagactgtgctgtggcggtatactggcacccgcccatccaatctggctaataacacaatcctggtgaagtggcttcctcagaacgaccttctgggccatcccatgacccgagcttttatcacacacgccggatcacatggagtttatgaatccatctgcaacggggtgccgatggttatgatgcctctttttggcgaccagatggataatgccaagcgtatggagacgaagggagctggcgtgactctgaacgtgctggagatgacatcagaagacctggaaaatgcgctgaaggccgtcatcaacgacaaaagttacaaggagaacataatgagactctccagcctgcataaggataggccagtagagccactggaccttgcagtattttgggttgaatttgtaatgaggcataaaggggcaccccatctgaggccagccgcgcatgatctgacctggtatcagtaccatagcctggatgtgattggcttcttgcttgccgtcgtgctgacggtagccttcattacattcaagtgttgcgcgtatggctatagaaagtgcctgggaaagaaagggagagtcaagaaggcacataagtctaagacgcac

SEQ ID NO: 20791 - DNA, 1599 bp, synthetic construct
  misc_feature 1..1599: note = source = /note="Description of Artificial Sequence: Synthetic coding sequence"
  source 1..1599: mol_type = other DNA
atggctgtggaaagccagggaggccgcccgttggtgctcgggctgctgctgtgcgttttgggaccagtggtgtctcatgcgggaaagatactgttgatccccgttgacggctctcactggctcagcatgctgggggcgattcaacagctgcaacagagaggtcatgagattgtggtgcttgcgcctgacgcctctctctacatccgcgacggagcattctacactcttaagacttatccagtgccattccaacgggaggacgtgaaggagtccttcgtctcccttggacacaatgtctttgagaacgactcctttcttcagcgcgtgatcaaaacttacaaaaagatcaagaaagacagcgccatgctgctctcagggtgttcgcacctcttgcacaataaagaactcatggccagcctggcggaaagctcctttgacgttatgctcaccgatccgtttctgccctgttccccgatcgtcgcacaatacctgtctcttccgactgtgttcttcctgcacgccctgccgtgctcactcgaattcgaagccactcagtgcccgaacccattctcctacgtgccacggccactgtcgtcccattcggatcacatgactttccttcaacgtgtgaaaaacatgctgattgccttctcacagaatttcctttgcgatgttgtgtacagtccgtacgctactctggcatcggaattcctgcaacgcgaagtgacggttcaggatctcctgtcctccgcttcggtctggctctttaggtccgacttcgtcaaggactaccccagacctatcatgcctaacatggtgttcgtgggcggcatcaattgcctccatcagaatccattgtcccaagagttcgaagcgtacatcaacgcgtcgggggaacacggaatcgtcgtcttttcactgggatcaatggtttcggagatcccggagaaaaaagcaatggccatcgccgacgccctgggtaagatccctcagaccgtgctgtggagatacacgggaactcggccgtccaacttggccaacaacaccatcctggtgaagtggctcccgcagaatgacctgctcggtcaccctatgaccagagctttcatcacgcacgctgggagccacggagtctatgagtcgatctgcaacggcgtacctatggtgatgatgccactgtttggagatcaaatggataacgcaaagcgcatggaaactaagggagcaggagtgaccctcaacgtgctggaaatgacgtcggaggacctggagaatgccctcaaggcggtcattaacgacaaatcctacaaggagaacataatgagactctcgtcgctgcataaggaccggccggtggaaccgctggatcttgcagtcttttgggtggaatttgttatgcgccataagggtgctccgcatctgaggcccgcagcccacgatctgacctggtaccagtaccactctctggatgtgatcggatttcttctggcggtcgtgctgactgtcgctttcataaccttcaagtgttgcgcgtacggctacaggaaatgccttggcaaaaagggccgcgtgaagaaggcccataagtccaagacccac

SEQ ID NO: 20792 - DNA, 1599 bp, synthetic construct
  misc_feature 1..1599: note = source = /note="Description of Artificial Sequence: Synthetic coding sequence"
  source 1..1599: mol_type = other DNA
atggcggttgaatctcagggaggccggcccttggtactcgggctccttttgtgcgtgttgggaccagtggtgtcacacgccgggaagatcttgttgatccccgtcgacggatcacactggttgtcgatgctgggtgcgatccagcagcttcagcagcgcggacatgaaatcgttgtgctcgcaccggacgcctctctttatatacgagatggggccttctacaccctgaaaacttatccagtgcccttccagagggaagatgtgaaggagtcctttgtgtcacttggacacaacgtattcgagaacgatagttttctacagcgcgttatcaaaacatataagaagatcaagaaggattccgctatgctgctgtcgggctgctcacatctgttacacaacaaagagcttatggcgagtttagccgaaagctctttcgatgtgatgctgaccgaccccttccttccgtgttctcccatcgtcgcgcagtacctgtcgttgcccacagtcttctttctgcacgctctcccttgcagcctcgaattcgaagcgacacagtgtccaaatccattctcttacgtgccacgtcccttatctagtcactctgatcacatgacgtttctccagcgggtgaagaacatgctgattgcctttagccagaatttcctctgtgacgtggtctactctccctatgcaacccttgcctcggaatttctgcagagagaagttaccgtgcaagatcttctgagcagcgcctccgtctggctttttcgctctgatttcgtgaaggactatccgcgccctattatgccgaacatggtgttcgtgggtggaatcaattgtctgcatcagaacccactttcccaggagttcgaggcttatatcaacgcctccggggaacatggcattgtcgtgttctcattgggcagcatggtgtccgagatccctgaaaaaaaggctatggctatagccgatgcgctcggaaaaattccccagacagtgctgtggagatatacgggcacccgcccaagcaatctggccaataatacgattttggtgaagtggcttccacagaatgacctgctaggacatcccatgacacgcgcctttataacccatgccggctcacatggcgtttacgaatcgatatgtaacggcgtgcccatggtaatgatgccattgttcggcgaccagatggataacgcaaagcgcatggagaccaaaggggcgggggtgaccctgaatgtgttggagatgaccagcgaggatcttgagaatgcactaaaagcagtcataaatgacaaatcatacaaggaaaacattatgcgtttgtcgtccttgcacaaagaccgcccggtggagccattggacctcgccgtgttttgggtggaattcgtgatgcgacataagggcgcccctcacctgcgacccgcggcccatgacctcacgtggtatcagtaccatagcttagatgtcatcgggttcctcttggcagtggtgttgaccgtagcattcataacttttaagtgttgcgcttatggatatcggaagtgcctaggtaagaagggacgtgtgaagaaggcacacaagtcaaagactcat

SEQ ID NO: 20793 - DNA, 1599 bp, synthetic construct
  misc_feature 1..1599: note = source = /note="Description of Artificial Sequence: Synthetic coding sequence"
  source 1..1599: mol_type = other DNA
atggctgtggagagccagggagggaggcccctggtgttgggactgctcttgtgtgtgttaggacctgtggtaagccacgccggaaagatcttgctgattccagtggatggcagccattggctgagcatgctgggtgctatccagcagctgcaacagagaggccatgagatcgtcgtgcttgcacccgatgccagtctgtatatcagggacggtgctttctacactcttaagacctaccccgtaccgtttcagagggaggacgtgaaagagtcgtttgtcagtctcgggcataatgtgttcgaaaacgacagtttccttcagcgcgtcatcaaaacctataagaagattaaaaaggactcagccatgttgctttctggctgcagccacttgcttcacaacaaggaactaatggcgtctttggcagagagcagtttcgatgttatgctgacggatcccttcctgccttgctccccaatagttgctcagtatctctcactgccgacggtgttcttcctgcacgctctcccctgttcattagagtttgaggccacacagtgcccgaatcccttcagctacgttcctcggcctctttctagtcactccgaccatatgacattcctccagcgcgtcaaaaatatgctcatcgcgttctctcaaaatttcctgtgtgatgtggtctattcaccgtacgccacactcgccagcgagttcctgcagcgggaagtcacggttcaagacctcctcagttccgcgtcagtctggctattcaggtctgatttcgtgaaggactacccacggccaatcatgccgaatatggtctttgtgggaggcatcaattgtctgcaccagaatccgttatctcaggaatttgaggcctacataaacgcctctggggagcacggcattgtggtgttctcccttggctctatggtctctgagattcctgagaagaaggctatggctatcgccgacgcacttggaaagatcccacaaactgtgctgtggcggtacaccggcacaagaccctcaaacttggccaataataccattctggttaagtggttgcctcagaatgatctgctggggcacccaatgactcgagcttttatcacgcatgcaggtagtcacggagtgtatgagtcaatctgcaatggcgtacccatggtcatgatgccactattcggggaccaaatggacaacgccaaaagaatggagaccaagggtgctggtgtgactctgaatgtgctggaaatgacctcagaagacctcgagaacgctctgaaggcggtgattaacgacaaatcctacaaagagaacattatgagattaagttccctgcacaaagaccgccccgtcgaacctcttgacctggctgttttctgggtggagttcgtgatgagacataaaggcgccccacatttgagacccgctgcccatgacctgacctggtaccagtatcacagcctcgatgtgataggcttcttactcgccgtggtacttactgtcgcctttattacttttaaatgttgcgcttacggctaccggaaatgtctagggaagaaaggtagagtgaagaaggctcataagagcaagacacac

SEQ ID NO: 20794 - DNA, 1599 bp, synthetic construct
  misc_feature 1..1599: note = source = /note="Description of Artificial Sequence: Synthetic coding sequence"
  source 1..1599: mol_type = other DNA
atggccgtagagagccagggcggccgaccattagtgctgggccttctcctctgtgtcctgggaccagtcgtgtcccatgccggaaaaattctgctcatcccagtcgatgggagccactggctatcgatgctgggcgccattcagcagctacagcagagaggccacgaaatcgttgtattggcccccgatgctagcctgtatattagagacggtgccttctacaccctcaagacctatcccgtacctttccagcgtgaggacgtcaaagaatcattcgtgagtctaggacacaacgtcttcgaaaatgactcctttctccagcgcgtgatcaaaacatacaagaagatcaagaaggacagcgcaatgttgctctccggatgctcgcatcttcttcataacaaggagcttatggcttccttagccgaaagtagcttcgatgtgatgttgacagaccccttcttaccttgttctcccatcgtggcgcagtatctaagcctccctacagtttttttccttcatgctctgccgtgttcactggaatttgaggctacacagtgccccaacccattctcatacgtgcctaggcccctctcaagccactcagaccacatgacctttctacaacgagttaaaaacatgctcatcgcctttagtcagaacttcctgtgtgacgttgtatacagcccgtacgctaccctggccagcgagtttctgcagcgggaggtcactgtccaggatttactgtctagcgctagtgtgtggctcttccgcagcgatttcgttaaggactatcccaggccgatcatgccaaatatggtgtttgtgggcggcatcaattgtctccaccaaaatccactttcgcaggagtttgaggcgtacataaatgcatctggtgagcacggaatcgttgttttctcactggggagtatggtatccgaaattcccgaaaaaaaagctatggccatcgcagatgctctggggaagatccctcaaacagtgctctggcgctacacaggaacacggccttcgaacttggccaataacaccatcctggtgaagtggttgccccagaatgacctgctgggacatccaatgacacgggctttcattactcatgctgggagccacggagtgtatgagtccatctgcaatggcgtccccatggtgatgatgcctttgtttggggatcaaatggataacgctaaacgaatggaaacaaaaggagcaggcgtgactttaaatgtgctcgagatgaccagcgaagacttggaaaacgccttaaaggccgttattaacgataaaagctataaagagaatataatgcgtctcagctcacttcacaaggatcgcccggttgaaccgttggatctcgcggtattctgggtcgaattcgtcatgcggcataaaggagctccccatctgaggcccgcggcacacgacctgacttggtatcagtatcactctctagacgtgattggattcttgctcgccgtggtcttaacagtcgcttttataacctttaaatgctgtgcctatggctatcgcaagtgcctcggaaagaagggcagagtgaagaaagcccataagtccaagacccat

SEQ ID NO: 20795 - DNA, 1599 bp, synthetic construct
  misc_feature 1..1599: note = source = /note="Description of Artificial Sequence: Synthetic coding sequence"
  source 1..1599: mol_type = other DNA
atggcggtggagagccagggtggcagaccattggtgcttggactcctgctctgtgtcctcggccccgtggtttcacacgcgggtaaaatcctgctcatacccgttgatggctcgcactggctgtcgatgcttggtgccatccagcaactgcaacagcgaggacatgaaattgtggtgttggccccagatgcaagcctgtacattcgcgatggagccttttacacccttaagacctacccagtgccttttcagagagaggacgtgaaagaatcgttcgtgtcactgggtcacaatgttttcgagaacgactcatttctgcaaagggtcattaagacctacaagaagataaagaaggactctgcaatgctgctttccggttgttcccacttgctccataacaaggagttgatggcgtcactggcagagagcagctttgatgtcatgctgactgaccccttccttccttgtagcccgattgtggcacaatatctttcgttgccaaccgtctttttcctgcatgcactgccgtgttcgctcgaattcgaagcaactcaatgtcctaacccttttagctacgtcccacggcctctttcctcgcattcggatcacatgaccttccttcaacgtgtgaagaacatgctgattgcgttttcacaaaacttcctttgtgatgtggtgtattcaccttacgcaaccttggcctcagaattccttcagcgcgaagtgactgtgcaggaccttctgtcgtccgccagcgtttggctctttcggtctgattttgtgaaagattacccccgacctattatgccaaatatggtgtttgtgggcgggatcaattgcctccaccaaaatcccctgtcccaggaatttgaggcatacattaacgcatccggagaacacggtatcgttgttttttcgctcggctcgatggtcagcgagatcccagaaaagaaagctatggcaatcgctgatgccctcgggaagattccccaaaccgtcctttggcgatacacggggactcgcccaagcaacctcgcaaataacactatactggtcaaatggcttcctcagaatgatctcctgggccatcctatgacccgggcatttatcacgcatgcaggttcacatggggtgtacgaatcaatatgcaatggagtgcctatggtgatgatgcctcttttcggagatcagatggacaacgcaaagcgtatggagacgaaaggtgcaggcgtgactctgaacgtccttgaaatgaccagcgaagatcttgaaaacgctttgaaggcggttatcaatgacaaatcctacaaggaaaacatcatgagactctcctcactgcataaggaccgtccggtggaacccttggatctggccgtgttctgggtggagtttgtcatgcgccataagggagcgccgcatctgaggccagccgcacatgatctcacctggtaccaataccactcccttgacgtgattggtttcttgcttgccgtggtgcttactgttgcttttatcacgtttaagtgttgcgcatacggataccgcaaatgcctcggaaaaaagggacgcgtgaaaaaggcgcacaagtccaagacgcac

SEQ ID NO: 20796 - DNA, 1599 bp, synthetic construct
  misc_feature 1..1599: note = source = /note="Description of Artificial Sequence: Synthetic coding sequence"
  source 1..1599: mol_type = other DNA
atggcagttgagtcccagggagggcgtcccctggtgctcggacttcttctttgtgtgctgggccctgtggtgagccatgcggggaagatcctgttgatccctgtggacggctcgcactggctgagcatgttgggggccattcaacaacttcaacagcgcgggcatgaaattgtggtcctggcaccggatgcgtctctgtacatacgggatggggcattctatactcttaagacctaccctgtgccattccaacgtgaggatgtcaaggagtcgtttgtctccctcggacataacgtgtttgaaaatgactcgtttctccagagagtgataaagacttacaagaaaatcaagaaggacagcgcaatgcttctgagcgggtgttcacacctccttcacaataaggagcttatggcctcgctggccgaatcttcgttcgatgtaatgcttaccgatcccttccttccatgttcgccaatagtggcacagtacctttcgctccccaccgttttctttcttcatgctttgccctgttcgctggagttcgaagccactcagtgcccaaaccctttttcgtacgtgcctcgccctctgtcctctcattccgatcatatgacgtttcttcagcgggtgaagaacatgctgattgcgttctcccagaattttctgtgcgacgtggtctactccccgtacgctactctcgcatcagaatttcttcaacgcgaggtgaccgtccaagatctgctcagcagtgcctcagtgtggctgtttcgcagcgactttgtaaaagattacccccgtccaattatgcctaatatggtctttgtgggtgggataaactgtctccatcaaaaccctcttagccaggaattcgaggcttacatcaacgcttcaggtgagcatggtatcgtggtgttctcccttggctcgatggtgtcggaaatccccgagaagaaggccatggctattgccgatgcccttggaaagattccacaaactgtcctttggagatacacgggtactagaccgtccaatctggccaacaacacgattctcgttaagtggctgccacagaatgacttgctgggccaccctatgacgagagcgtttatcactcacgccggttcacatggtgtgtacgagtcgatttgcaacggtgtccccatggtgatgatgcctctttttggcgaccaaatggataacgcaaaaagaatggaaactaagggagcaggagtgaccctcaatgtcttggaaatgacgtcagaagatctggagaacgctctgaaagcagtgattaacgataaatcctataaagaaaacattatgagactgtcatcgctccacaaggataggccagtggaacctctcgatctggcggtcttttgggtggaattcgtcatgcggcataagggagctcctcacctcagacctgcagcccatgatctgacttggtaccagtaccatagcctggacgtcattggatttcttcttgcggtagtgttgactgtcgcattcattactttcaaatgctgtgcatacggataccgaaagtgtctcggaaaaaagggtagggtcaagaaggcccacaagagcaaaactcat

SEQ ID NO: 20797 - DNA, 1599 bp, synthetic construct
  misc_feature 1..1599: note = source = /note="Description of Artificial Sequence: Synthetic coding sequence"
  source 1..1599: mol_type = other DNA
atggcagtggaatctcaaggtggccggcctctggtgctgggccttctgttgtgtgtccttggaccagtggtttcccatgctggaaagattctgctgattccggtcgacggatcccactggctctccatgcttggagcaattcagcaactgcagcagagagggcatgaaatcgtcgtgctggcgcccgatgcatcactctacattagggacggggcattctacactctgaaaacctaccccgtgcctttccaacgcgaagatgtgaaggaatcattcgtctctctgggtcacaatgtctttgaaaacgactcatttctccaaagagtgatcaaaacttacaagaaaatcaaaaaggactcagccatgctgctgtctggttgctcccacctgctgcacaataaggagctgatggcttcacttgctgagtcgtcttttgacgtgatgctgaccgaccctttccttccatgcagcccaattgtggcacaatatctgtccttgcccaccgtctttttcctgcacgctctcccatgttcactggagttcgaagcaacccagtgcccgaacccattttcgtacgtcccgcgccccctgtcgtcacacagcgatcatatgacctttctccaacgagtgaagaacatgcttattgccttcagccagaattttctctgtgatgtggtgtactcgccttacgcaaccctggcaagcgagtttttgcaaagagaggttaccgtgcaggatctgctttcatccgccagcgtgtggttgtttcgctcggattttgtcaaagattacccgcggccaattatgccgaacatggtgttcgtcggagggatcaattgtctccatcaaaaccctttgtcgcaagagtttgaagcatacattaatgccagcggtgagcacggaattgtggtgttttcgctgggatccatggtttccgaaatccccgagaagaaggcaatggcaattgcggatgcactcgggaaaatcccacagacggttctttggcggtacactgggaccagaccctcgaatctggcaaacaataccatcctggttaaatggctgccacagaatgacctgctgggccatccaatgactagagcattcatcacccatgcaggcagccatggagtgtacgagagcatatgtaacggagtgccaatggtcatgatgccactttttggtgatcaaatggacaacgcaaagagaatggagactaagggagctggagtgactcttaacgtgttggagatgacttcggaagatcttgagaacgctctgaaggcagtgattaatgataagtcgtacaaggaaaacatcatgcgtctgtcgtccctgcataaagatcgccctgtcgagcctctcgacctggcggtgttttgggtggaatttgtcatgcggcataagggcgcacctcatttgcgacccgcggcacatgatctcacttggtaccagtaccattcgcttgacgtcatcggatttctgcttgcagtcgtgcttaccgtcgcctttatcacttttaagtgttgcgcatacggataccggaaatgcctgggaaagaagggacgggtcaagaaagcacataagtccaagacccat

SEQ ID NO: 20798 - DNA, 1599 bp, synthetic construct
  misc_feature 1..1599: note = source = /note="Description of Artificial Sequence: Synthetic coding sequence"
  source 1..1599: mol_type = other DNA
atggctgttgaatcacaaggaggaagaccacttgttcttggtttgttactatgtgttttaggaccagttgtttcacatgcaggtaaaattcttttgattccagtagatggatcacattggttgtcaatgttaggagcaattcaacagttacaacaaagaggtcacgaaattgtagttttagctcctgatgcaagtttatatattagagatggagcattttatacattaaagacatatccagttccatttcagagagaagatgtaaaggaatcttttgtttcattgggacataatgtttttgaaaatgactcatttttacaacgtgttattaaaacctataaaaaaatcaaaaaagattcagctatgttactttctggatgtagtcatttacttcataataaagaacttatggcatcattagctgaaagttcatttgatgttatgcttactgatccattcttgccatgttcaccaattgttgcacaatatcttagtttgccaactgttttttttttacatgcattaccatgtagcttagagtttgaagctactcaatgtccaaatccattcagttacgttccaagacctctttctagtcattctgatcacatgacatttttacaaagagttaaaaatatgttaattgcattttctcaaaactttttatgtgatgttgtgtactcaccttatgcaactttggcaagtgaatttttgcaaagggaagttactgtacaagatttattgtcaagtgcttcagtgtggctttttagatctgattttgtgaaggactaccctagaccaattatgccaaacatggtttttgttggtggaataaattgtttacatcaaaatccattatctcaagaatttgaagcatatataaatgcatcaggagaacatggtatagttgttttctctcttggatctatggtttcagaaattccagaaaaaaaagcaatggctattgctgatgcattaggaaaaattcctcaaacagtattatggagatatactggaacaagaccatcaaatcttgccaataatactattttagtaaagtggttacctcaaaatgaccttttaggacatcctatgacaagagcttttataactcatgctggtagtcatggagtttatgaatcaatttgtaatggagttccaatggttatgatgccattatttggagatcaaatggataatgcaaaaagaatggaaacaaagggagctggagtaacattaaatgttttagaaatgacttctgaagatttagaaaatgcattaaaagcagttataaatgataaatcgtataaagaaaatatcatgagattatcatcacttcataaggacagaccagttgaacctttagacttggcagttttctgggtcgaatttgtaatgagacataaaggagctccacatttacgaccagctgctcatgatttaacatggtatcaatatcattctttagatgttattggatttcttttagcagttgttcttacagtagcatttattacatttaaatgctgtgcatatggatatagaaaatgtttaggtaaaaaaggaagagttaaaaaggcacataaatcaaaaacacat

SEQ ID NO: 20799 - DNA, 1599 bp, synthetic construct
  misc_feature 1..1599: note = source = /note="Description of Artificial Sequence: Synthetic coding sequence"
  source 1..1599: mol_type = other DNA
atggctgtggagtcgcagggcggaaggccactggtgctcggcctgcttctgtgtgtgcttggtcctgtcgtgagccacgccggtaagatactgcttatcccagtagacggatcgcattggctgtctatgctcggagctattcaacaacttcaacagagagggcacgaaatcgtcgtcctggcgcccgatgcctcattgtacatacgagacggagcattctacacgttgaaaacctaccctgtccctttccaaagagaggatgtgaaggagtccttcgtgtccctcgggcataacgtgtttgaaaacgacagctttctccaaagagttatcaagacctacaagaagataaagaaggatagcgcaatgctgctcagcggatgctcccatcttctgcacaacaaggaactgatggcatcgctcgcagaaagctcctttgacgtgatgctgacggatccctttctgccttgttcaccaattgtcgcacagtacctgtcactgccgactgtcttttttctgcatgcactgccatgtagcctggagtttgaagccacgcagtgtccaaatcccttttcctacgtccctagacctctttccagccacagcgatcatatgaccttccttcaacgggtgaagaacatgcttatcgcattttcccaaaactttctgtgtgatgtcgtctattcgccttatgcaactctcgcttcagaatttcttcagagagaagtgactgtgcaagatctcctgtcatcggcgagcgtgtggctctttcgatcagattttgtcaaggattacccaagaccgatcatgcccaacatggtttttgtgggtggcattaactgtctccatcagaaccctctttcacaggagtttgaggcatatatcaacgcaagcggagaacacggaatagtggtgttttcgcttggatcgatggttagcgaaatcccagagaaaaaagcgatggcaatcgctgatgcccttggtaagataccacaaacggtgctgtggagatacaccggtactcgcccatcgaatcttgccaataacactatacttgtgaagtggctgcctcaaaatgacctgctgggtcatcctatgaccagagctttcattacccatgcaggtagccatggagtgtacgaatcgatttgtaacggggtccctatggtcatgatgccccttttcggtgaccaaatggacaacgcaaagagaatggaaactaaaggcgccggcgtgactctgaatgtgcttgagatgacttctgaggatcttgaaaatgcgcttaaggccgtcattaatgataaatcatacaaggagaacatcatgcgcctcagctcgcttcataaggatcgccctgtggaacccctggatctcgccgtgttttgggtcgaattcgtcatgcgacataagggggcaccccatcttagacccgcagcacatgatttgacctggtaccagtaccactcgctggatgtgatcggattcctgctggccgtggtcttgaccgtcgctttcattactttcaagtgctgtgcatacggatacagaaaatgtctgggaaagaaaggtagagtgaaaaaagcccataagtccaaaacgcac

SEQ ID NO: 20800 - DNA, 1599 bp, synthetic construct
  misc_feature 1..1599: note = source = /note="Description of Artificial Sequence: Synthetic coding sequence"
  source 1..1599: mol_type = other DNA
atggcagtcgaatcgcagggagggcggcccctggtcctgggactgctgctttgcgtgctgggaccggtggtgtcacacgctggcaagatccttctcatcccagttgacggatcccattggctctccatgttgggtgcgatccaacagctgcagcaacgcggacatgaaatcgtggtcctcgcgccagatgcatcgctttacatccgcgacggggcattctacacccttaagacttacccggtaccctttcaacgcgaagatgtgaaggagtccttcgtgtcgcttggacacaatgtgtttgaaaacgacagcttccttcagagagtgatcaagacctacaaaaagatcaagaaagattcagccatgcttctctcaggatgcagccacctgctgcataacaaggagctgatggcctcactggccgaatcatccttcgatgttatgctcactgatcctttcctcccgtgctcaccgattgtggcccaatacctttcgctccctaccgtgtttttccttcacgcactcccatgctccctggagtttgaagcaacccagtgcccaaacccgttctcctacgtgccgcgccccctgtcatcacactcagaccacatgacgtttctccagagggtcaagaatatgctgattgcattttcgcaaaacttcctctgcgacgtcgtgtactctccgtacgccactctggcgtcggagttcctgcaacgcgaagtcaccgtgcaggaccttctctcgtccgcctccgtttggctgttccggtctgatttcgtcaaagattacccacgaccgatcatgcctaacatggtgttcgtgggaggtatcaactgtctgcatcagaatccgctttcgcaagaattcgaagcctacattaatgcatcgggagagcatggaatcgtggttttctccctcggtagcatggttagcgaaattcctgagaaaaaggcaatggccatcgccgatgccctggggaaaataccgcagactgtgctctggcggtatacgggtacccggccgtccaacctcgcgaataacactattctggtgaagtggctgcctcagaatgatttgctgggccatccaatgacccgggcctttatcactcacgcaggatcgcatggagtgtacgagtccatctgtaacggcgttccgatggtgatgatgccgctctttggggaccagatggacaacgccaagcggatggaaaccaagggagcgggagtgactctgaacgtcttggaaatgacttccgaggatctggaaaatgccctgaaagcggtgatcaacgacaagagctacaaggagaacattatgagactttcgtcactgcacaaggatcgaccagtggagccgctcgatctggctgtcttttgggtggagttcgtgatgcgccacaagggagccccccacctgcggcctgcggcgcatgaccttacctggtaccagtatcactcgctggatgtgattggctttctgctggccgtcgtactgaccgtcgccttcatcactttcaagtgctgcgcatacggctacagaaagtgtctcggcaagaagggacgggtgaagaaggcacacaagtcgaaaacccac

SEQ ID NO: 20801 - DNA, 1599 bp, synthetic construct
  misc_feature 1..1599: note = source = /note="Description of Artificial Sequence: Synthetic coding sequence"
  source 1..1599: mol_type = other DNA
atggctgtcgagtcacaaggtggaaggcccctggtgctggggctcctgctgtgtgtccttggcccggtggtcagtcatgcgggtaaaatcctcttaatacctgtcgatgggtctcattggttgagtatgttgggagccatccagcagctgcagcagaggggacacgaaatagtggtcctcgcccctgatgcaagtctgtatattagggacggcgccttctacactttaaagacctatcctgtgccgttccaaagagaggacgtgaaggagagtttcgtgtccctgggacataacgtgttcgagaacgactctttcctgcagagagtgatcaaaacttataaaaaaataaagaaagattccgccatgttactgagtggatgttctcatctccttcataacaaggaactgatggcaagccttgccgaatcttcttttgatgtgatgctgaccgatccatttttaccctgtagccctattgtggcccagtacctgagccttcctacagtctttttcttacacgccctaccgtgttctttggaatttgaggctacgcagtgcccaaatcccttctcttatgtgccccggccgctcagctctcactcagatcatatgacgtttctccagcgcgtaaaaaacatgttgatcgcgttctctcagaacttcctgtgcgacgtggtctacagtccatacgccactcttgccagcgagttcttacagagagaagtgacggtgcaggacctgctatcttctgcctccgtgtggctgttccggagcgactttgtaaaggattatcctaggcctatcatgcctaatatggtgtttgtcggcgggatcaactgtctccaccagaatcccctatcacaggaattcgaagcttatataaacgctagcggagagcatggcatcgtagttttcagccttggctccatggtttccgagatacctgaaaagaaagcgatggccatagcggacgccttagggaagattccacagactgtactttggcggtacactggaactcgtccaagcaaccttgcaaataataccatcctggtgaaatggcttccacagaacgacttgctgggtcatcccatgactagggcattcatcacccacgccggtagccacggcgtttacgagtccatatgtaacggagtacctatggtcatgatgccactctttggcgaccaaatggacaatgccaagcggatggagacgaagggtgcaggcgtaacactgaacgtactcgaaatgacctccgaggacctggagaatgccctgaaggctgttatcaatgataaatcttataaagaaaacatcatgcgcctttctagcctccacaaggacagacctgtggagccactggatcttgcagtcttctgggtcgaatttgtgatgcgccataaaggagctccacacttaagaccggccgcacacgacctcacatggtatcaataccactctctggatgtaataggattcctgctggccgttgtacttaccgtggcttttatcaccttcaaatgttgcgcctatggctaccgaaagtgtctcggaaagaaaggccgggttaagaaagcacacaaatccaagacccac

SEQ ID NO: 20802 - DNA, 1599 bp, synthetic construct
  misc_feature 1..1599: note = source = /note="Description of Artificial Sequence: Synthetic coding sequence"
  source 1..1599: mol_type = other DNA
atggcagtggagagccaaggaggacgacctctcgtcctgggtctcctgctgtgcgtgctggggcccgtggtgtcccatgcgggaaagatcctgttgatccctgtagatggctcccactggttgagtatgcttggagctatacaacagctccaacagagggggcacgagatcgtggtcctggcgcctgacgcctctctatacattagggatggcgcattctatactctgaagacctacccagtgccctttcagagagaagacgtgaaagagtctttcgtttccctcgggcacaatgtgtttgaaaatgactcctttctgcagagagtaatcaaaacatataagaagattaaaaaagattccgccatgctgttgtccggctgttctcatcttcttcacaataaggagctgatggcctctctcgctgaatctagctttgatgttatgctaaccgacccattcctcccctgcagtccaattgtagctcaatacctgtcactgccaacagtgttcttcttgcacgcactgccatgtagcttggaatttgaggcaacacagtgtcccaatccattttcatacgtaccacgtcctctttcctcacactccgaccacatgaccttccttcaaagggtgaagaacatgctcattgcattctcacaaaattttttgtgcgacgtggtgtattctccatatgcaactttggcctctgagtttcttcagcgggaagttacggttcaggatctgttatcaagtgccagtgtttggctgttccggagcgattttgtaaaggattatccgcgcccaatcatgcctaatatggtttttgttggcggaataaattgtttgcaccagaaccctctgtcgcaggagttcgaggcttatatcaatgcttctggagagcatggcattgtcgtgttctcacttggcagcatggtgtctgagatcccagaaaaaaaagccatggccattgccgacgccttgggaaaaatcccacagacagtattatggcggtacacaggtacaagaccgtctaacctggccaataatactatcctggtcaagtggcttccccaaaacgatctgctgggccatcctatgacacgtgcattcataacgcacgccggctcacacggagtttacgagtccatatgcaacggtgtgccgatggtcatgatgcccctctttggcgatcagatggataatgccaagaggatggagaccaagggggctggggtcactctgaacgttctggagatgaccagcgaggacttggagaacgccctgaaggccgtgatcaacgataagtcctacaaggaaaatattatgagactgagcagcctgcataaagatcgaccagtggagcctctagatctagccgtcttttgggtggagttcgtaatgaggcacaagggggctccccacttgcggccagcagcacacgatcttacatggtatcagtatcactcactggacgtcatcgggtttctcttggccgttgtgctgaccgtggccttcattacttttaaatgctgtgcctatggctatagaaaatgtctgggaaaaaagggaagagtcaagaaggctcacaagtccaagacacat

SEQ ID NO: 20803 - DNA, 1599 bp, synthetic construct
  misc_feature 1..1599: note = source = /note="Description of Artificial Sequence: Synthetic coding sequence"
  source 1..1599: mol_type = other DNA
atggccgttgaaagtcagggaggccgtcccctagtgctaggcctcctgctctgcgtgcttggcccagttgtgtctcacgccggaaaaatcctcctgattcccgtggacggatcccattggctgagcatgctgggggccatccagcagctacaacagcgtggacatgagattgtggtcctcgctcccgacgcaagcctgtacatacgagatggcgccttttacaccctgaagacctaccccgtcccttttcagagggaagatgtcaaggaatcattcgtgtcactcgggcataatgtgtttgaaaacgactcctttctccagagggtgatcaagacctataaaaagattaaaaaggattctgctatgctgttaagcggatgttcccatttgctccacaacaaggaactaatggctagtctggctgagagtagctttgatgttatgctcacagacccattcctgccttgtagtccaatagtcgcacagtacctgagtctgccaaccgtgttcttcttgcatgctttaccatgcagcctggagtttgaggccacccagtgccccaatcctttctcctacgtgccaaggcctctgagctcccattctgatcacatgaccttcctgcagagagtaaaaaatatgctcatcgcattcagtcagaattttttgtgcgacgtggtttatagcccatacgcaacactagccagcgagttcttacagagggaggttactgtgcaagatctcctgagtagcgcctctgtgtggctgtttcgcagcgacttcgtgaaggactatcctcgccctatcatgccaaacatggttttcgtgggcggtataaattgcctgcaccagaaccccctaagccaggaattcgaagcctacataaacgcctctggagagcatggcatcgtggttttcagtctcggaagtatggtctctgaaataccggaaaagaaagccatggcaattgcagatgccttaggcaagatcccccagactgtcctgtggcggtacaccggaacccgaccatcaaatctagccaataatacaatactggtgaagtggttaccacagaacgacttactcggccacccaatgacaagggcctttattactcacgctggctctcatggcgtctacgagtccatctgcaacggggttcctatggtcatgatgcccctatttggggatcagatggacaatgcaaagcgcatggagacaaagggtgccggggtgactctaaatgtgctggagatgaccagtgaagatttagaaaatgccctgaaggccgtgataaatgataagagctacaaagagaacatcatgcgtctcagcagcctgcacaaggaccggcctgtggagcccctggacctggctgtgttttgggttgagttcgttatgaggcacaaaggcgctcctcacctgaggcccgctgcccacgacctcacctggtaccaatatcacagcctggatgtgatcgggttcctactcgctgttgtgctcactgtggcctttattaccttcaagtgttgcgcctacggctatagaaagtgcctggggaagaagggacgggtaaaaaaagcacacaagagtaagacccac

SEQ ID NO: 20804 - DNA, 1599 bp, synthetic construct
  misc_feature 1..1599: note = source = /note="Description of Artificial Sequence: Synthetic coding sequence"
  source 1..1599: mol_type = other DNA
atggcagtagaatcacagggaggaagacccctggtcttagggctcctcctatgtgttttaggtcccgtcgtctctcacgctggaaagatcttgcttattccagttgatggctcccactggctgagtatgctgggcgccatccagcaactgcagcagagaggacatgagatcgtggttcttgcaccggatgccagcctctacatccgcgacggagcattctacacccttaaaacgtatcccgtccccttccagagagaggatgtaaaagagagtttcgtttctctgggccacaacgtcttcgagaacgactcgttcctgcaaagagtcattaagacatataaaaagatcaaaaaggactcggcaatgctgctttcaggctgttctcatctgctgcataacaaagagctgatggcatctctagcggagtcctctttcgatgtaatgctaacagatcctttccttccatgttccccaattgttgctcaatacctcagtttgcccaccgtattcttccttcacgctctaccctgcagcttggaattcgaagccacccagtgtccaaatcctttctcctatgtgccgcgaccgctctcatctcatagcgaccatatgacatttctgcaacgcgtcaaaaatatgctaattgcattcagtcagaactttttgtgtgacgtggtttattcgccctatgctaccctagcctccgaattcctgcaaagggaagtcacagtgcaagacctccttagtagcgcctccgtgtggctgtttaggtcagactttgtgaaggattatcctcgcccaattatgccaaatatggtttttgtgggcggaatcaactgccttcaccagaatccattaagtcaggagttcgaggcctatatcaatgcttcaggggaacacggcatcgttgtgtttagcctaggctccatggtttcggagattcctgagaagaaagcaatggccatcgctgacgccctgggaaaaattccgcagaccgttctttggaggtataccggcacccggccctccaatttggcaaataatactattctcgttaagtggctcccccagaacgatctcctgggtcacccaatgaccagagcctttataacccacgcgggttcccacggagtgtacgaaagtatctgcaatggtgtaccaatggttatgatgccattgtttggagaccaaatggacaatgcaaaaagaatggagaccaagggtgctggcgtaaccctcaacgtcctggaaatgacatcagaggacctggaaaacgccctcaaagccgttattaatgacaaaagctacaaggagaacataatgcggctgtcctcgttacataaggatcgaccagtagaacctctcgacctggctgtcttttgggtagagttcgttatgcgacataaaggcgcccctcacttgagacctgcagcacacgacctgacttggtatcaatatcattcgctcgatgtcataggcttcctcttggcggtcgtgctgacggtggcgtttattacgttcaagtgttgcgcttacggataccgaaaatgtctcggaaaaaaaggccgggttaaaaaagcccataagtcaaagactcac

SEQ ID NO: 20805 - DNA, 1599 bp, synthetic construct
  misc_feature 1..1599: note = source = /note="Description of Artificial Sequence: Synthetic coding sequence"
  source 1..1599: mol_type = other DNA
atggccgtggaatcccagggagggcgaccattggtcttgggtttgctgctgtgtgtcctgggaccagttgtctctcatgcgggtaaaatacttctgattcctgtggacgggagccactggctcagtatgctgggagctatccagcagctgcagcagcgagggcacgagatcgttgtcctcgcacccgacgctagcctttatatccgggatggcgccttttacactctgaaaacctatcctgtgcccttccagcgagaggatgtgaaagaatcgtttgtatctttgggtcacaatgtgttcgagaacgacagctttctgcaaagggttataaagacttataagaaaatcaagaaagactcagccatgctactgtccgggtgtagccacctgctgcacaataaggagctcatggcaagtctggcagagagtagctttgatgttatgttaacggaccctttcctcccatgttcccccattgtggcccagtacctgtctttgcccacggtcttctttttgcacgctcttccttgttcacttgaattcgaggccactcagtgccccaatccattctcctatgtcccccggcctttgtccagccattctgatcacatgaccttcctgcagagagtgaaaaatatgctgattgcgtttagtcagaactttctatgtgatgttgtgtactccccatatgctacactggccagcgagttcctgcagagggaggtgactgtgcaggacctcctgtcaagtgcatccgtctggctgtttagatccgacttcgtgaaggattatcctcgaccaatcatgcccaacatggtttttgtcgggggcatcaactgcttgcaccagaatcccctgtctcaggagttcgaggcctatataaatgcaagcggggagcacgggattgtggttttctcgcttggaagtatggtgtccgagattcccgaaaaaaaggcaatggctattgccgatgctctagggaaaataccccagactgtactctggcgatacacaggcactcgtccctctaacctagctaacaacacgatcttggtcaaatggctgccccaaaacgatcttctagggcacccgatgaccagagcattcatcacccatgccggttctcatggcgtgtatgagtccatctgcaacggagtcccaatggtgatgatgcctctgtttggggatcagatggacaatgccaaacgtatggagacaaaaggtgcgggggtgactctgaacgtgctggagatgacgtccgaagatctggaaaacgccctgaaggccgttataaatgacaagagttataaagaaaacattatgagactctccagcctgcataaagatagacccgtcgaacctttggacctagccgtcttctgggtggagtttgtgatgaggcacaagggcgctccacacctccgccctgccgcgcacgatttgacatggtatcaatatcatagtctagacgttatcggctttttactggccgtggtcctaaccgtagcgtttattacatttaagtgctgtgcctacggctatagaaaatgtttgggaaagaaaggtagggtgaagaaggctcacaagtctaagacccac

SEQ ID NO: 20806 - DNA, 1599 bp, synthetic construct
  misc_feature 1..1599: note = source = /note="Description of Artificial Sequence: Synthetic coding sequence"
  source 1..1599: mol_type = other DNA
atggccgtggagtcccagggcggcagacctttagtgttgggcctgctgttatgcgtcctgggtccggtcgtttcccacgctggaaaaatcctgcttattccagtggatggctcacactggctgagcatgctgggcgcaatccagcaacttcagcagcgcgggcacgaaattgtagtactcgctccggatgcttccttgtacatccgcgacggggccttctatacactgaaaacttatccagtccccttccaacgcgaggacgtgaaggaatcttttgtcagccttggacacaatgtctttgagaatgattccttcctacagcgggttatcaaaacctataagaagataaaaaaggactcggccatgctgctctcagggtgttcacacctcctccacaacaaggagttgatggcgtctctcgcggagtcatcctttgacgtaatgttgacagaccctttcctaccctgctctcctatcgttgcgcagtacctgagtctgccaacggtcttcttcttgcatgccctgccatgcagcctggagtttgaggcaactcagtgccccaatccattttcatatgtcccaagacccctgagctcacatagtgaccacatgacgttcttacagcgagtgaaaaacatgctgatcgccttctcccagaattttctgtgcgacgtcgtctactctccctacgcaaccttggcgagtgagtttctgcaaagggaagtgacagttcaggatctgttgtccagcgcatccgtgtggttgtttcgctcagatttcgtgaaggactacccgcgtccgatcatgcccaacatggttttcgtgggcggcattaactgccttcaccaaaatcccctgagccaggaattcgaggcctatattaacgcaagcggggagcacggcattgtagtgttctcattgggatcgatggtgagcgaaatcccagaaaaaaaggctatggcaatcgcggacgcgttgggcaagatcccccaaactgtgctgtggcgttataccggtacccgaccctccaaccttgccaacaataccatcctggtgaagtggttgcctcagaacgatctgttggggcatccaatgacccgcgctttcatcacccacgccggatcacacggtgtatacgaaagcatctgtaacggtgtgcctatggtaatgatgcctctattcggcgaccagatggacaatgccaagcgtatggagacaaaaggagctggtgtgaccttaaacgtcttggagatgaccagtgaagacctggaaaatgcgttaaaggccgtgattaatgataagtcgtacaaagaaaacatcatgcgccttagcagcctgcacaaagaccggccagtagaaccactagacctcgccgttttttgggtggagtttgtgatgagacacaaaggtgcccctcacctgcgcccagccgcacacgatctgacttggtaccaataccactcgctagacgttattgggtttctcttagctgtcgtgctcacggtcgctttcatcacgtttaagtgctgcgcctacggttacagaaagtgtctgggcaagaagggtagagtgaagaaagcccacaagtcaaaaactcac

SEQ ID NO: 20807 - DNA, 1599 bp, synthetic construct
  misc_feature 1..1599: note = source = /note="Description of Artificial Sequence: Synthetic coding sequence"
  source 1..1599: mol_type = other DNA
atggcagtcgaatcacaggggggtagaccccttgtgctcggcctgttgctttgtgtccttggaccagtggtgtcacatgcgggaaaaatccttcttattccggtggacggttcacattggctgtcgatgctgggcgccattcaacaactgcaacaaaggggccatgaaatagtcgtgctggcaccagatgcttccctgtacatcagagatggtgcgttttacacgctcaagacttatcctgtcccattccagagagaggacgtgaaggaatctttcgtctcgctcggtcataacgtgttcgagaacgatagctttcttcaaagagtgattaagacctacaagaaaatcaagaaggattccgcaatgctgctgtcaggatgttcacatctgctgcacaacaaagaactcatggcatctctggcagagagctcgtttgatgtgatgcttaccgaccctttcctgccgtgttcgcctatcgtcgcacagtacttgtcgctgcccactgtgtttttccttcatgcactgccatgctcgttggaattcgaggcgacccagtgcccaaacccttttagctacgtgccccgacccttgtcatcccattcggaccacatgaccttcctgcaacgggtgaagaatatgttgatcgcgttctcgcagaatttcctctgtgacgttgtctattcaccttacgcgacccttgcctccgagtttctccaaagagaggtgaccgtgcaagatctcctttcaagcgcctctgtctggctgttcagaagtgattttgtcaaagattaccccaggcccatcatgcctaatatggtattcgtcggaggcattaactgtctccaccagaatcccctttcacaagaattcgaagcgtacatcaatgccagcggcgagcatgggatcgtcgtctttagcctggggagcatggtgtcggagattccggagaagaaggcgatggcaatcgcagacgcactgggcaagatcccccaaaccgtgctctggaggtacactggaaccagaccttcaaaccttgcaaacaatacgatcctggtcaagtggcttccacagaacgatctccttggacatccgatgactcgcgccttcattactcatgcaggatcccatggagtctacgagtccatttgtaacggggtgccaatggttatgatgccgcttttcggagatcagatggacaatgcaaagcgaatggaaactaaaggtgccggggtgaccctgaacgtgcttgagatgacgagcgaggatcttgagaatgccctgaaggctgtcattaatgataagtcgtacaaggaaaacataatgcgactgagctccctgcacaaggatcgccccgtggaaccccttgacctggcagtgttttgggtcgaatttgtcatgcggcataagggggcgcctcatcttcggccagccgcacatgatcttacttggtaccagtaccattcgcttgacgtgattggctttctgttggcagtggtcctgaccgtggccttcatcacttttaagtgctgtgcatacggatatcgcaagtgtctgggaaaaaagggtcgggtcaaaaaggcacataagtccaagacccat

SEQ ID NO: 20808 - DNA, 1599 bp, synthetic construct
  misc_feature 1..1599: note = source = /note="Description of Artificial Sequence: Synthetic coding sequence"
  source 1..1599: mol_type = other DNA
atggctgtggaatcgcaaggaggacgcccgctggtgcttggcctcctgctttgtgtcctgggaccagtggtgtcccatgcaggaaagatccttctgatcccagtcgacggatctcactggttgtcaatgctgggcgccatccagcaacttcaacagcgcggacatgaaatcgtggtgctggcgccggacgcttccctgtacatccgcgatggagcgttctacactcttaagacctatccagtcccgttccagagggaagatgtgaaggagtcgtttgtgtcattgggccacaacgtgttcgagaatgacagcttcctccaacgcgtgattaagacttacaaaaagatcaaaaaagattcggcaatgctgctctctggatgcagccaccttctgcataacaaggaattgatggcgtctcttgcggaatcgtcgtttgacgtgatgctgaccgatccttttctgccgtgcagcccgatcgtcgcccaatacttgtccctcccgaccgtgttcttcctgcatgcactcccatgcagcctggaattcgaggcaactcagtgcccgaatccgttttcctacgtgcctcggcctctttcgtcgcactcagatcacatgacctttctgcaacgcgtgaagaatatgctcatcgccttctcacagaacttcctgtgcgacgtggtgtactcaccctacgctactctggcctcagaattcctgcaaagagaagtcaccgttcaggacctgctgtcgtcggcgtccgtgtggctcttccgctcggatttcgtgaaggattaccctcgcccaatcatgccaaacatggtgttcgtcggaggaattaactgtttgcaccagaacccactgtcacaagaatttgaagcctacatcaacgcctccggcgaacacggcatcgtggtgttctccctcggctccatggtgtccgaaatcccggaaaagaaggcaatggcgatagcggacgccctgggaaagattccccagaccgtgctgtggcgatacaccggtactcggcccagcaacctggccaacaacactatcttggtgaagtggctgccacagaacgatctcctcggacacccgatgacgcgggccttcatcactcacgctggatcgcacggagtgtacgaaagcatctgcaatggagtgccgatggtgatgatgcccctctttggcgaccaaatggacaatgcgaaacggatggaaaccaaaggcgctggtgtcactctgaacgtgctggaaatgacttcggaagatctggaaaatgccctcaaggctgtgattaatgacaagtcttacaaggagaacatcatgcgcctcagctccctgcataaagatagaccggtcgagcccttggatctggcagtgttctgggtggagttcgtgatgcgccataagggagccccccacctcaggccggccgcacacgatctcacctggtaccagtaccatagcttggacgtgatcggcttccttcttgccgtggtgctgaccgtggctttcatcacctttaagtgttgtgcctacgggtaccgcaaatgcttgggaaagaagggaagagtgaagaaggcccacaagtcaaagacgcac

SEQ ID NO: 20809 - DNA, 1599 bp, synthetic construct
  misc_feature 1..1599: note = source = /note="Description of Artificial Sequence: Synthetic coding sequence"
  source 1..1599: mol_type = other DNA
atggccgtggaatcccagggagggcgtcctctcgtgctcggactccttctgtgtgtcctgggcccggtggtgtcacacgcaggtaaaatcctgctgatcccagttgatgggtcccattggctgtcgatgctcggagccatccagcagctccaacaaagaggacatgaaatcgtggtgctggcccccgacgcctctctctacattagggacggcgccttctacactctgaaaacctacccggtgccgtttcagcgcgaagatgtgaaggagagctttgtgtccctcgggcacaacgtgttcgagaacgactcgttcctccaacgggtcatcaaaacctacaagaagatcaagaaggacagtgccatgctccttagcggctgcagccacctcttgcacaataaggagctcatggcctctctggccgagtcatcctttgatgtgatgttgaccgacccttttctgccgtgctccccgatcgtggcgcagtacctgtccctcccaactgtgttcttcttgcatgccctgccgtgtagcctcgaattcgaagccacccagtgcccgaaccctttctcgtacgtgcctcgtccgctgtcctcccacagtgatcacatgactttcctgcagcgcgtgaagaatatgctgatcgcgttctcacaaaacttcctgtgcgatgtggtgtattcaccatacgcaactctcgcatcggagtttctgcaaagggaggtgaccgttcaggatctgctctcatccgcgtcagtttggctcttcagatctgatttcgtgaaagactatccgcgcccgatcatgccgaacatggttttcgtcggaggtatcaactgcctgcatcaaaaccccctgagccaggagtttgaggcatacatcaatgcctcaggcgagcacggaatcgtcgtattctccctcggatccatggtgtccgaaatccctgagaagaaggccatggcaatcgccgacgctctcggaaaaatcccgcaaaccgtcctgtggagatacaccggaacgaggccttccaacttggccaataacactattctggtcaaatggctgccccagaacgacctgttggggcaccccatgactcgggcgttcatcactcacgcgggatcccacggtgtctacgagtcaatctgtaatggagtcccgatggtgatgatgccgcttttcggtgaccagatggataacgcaaagcgcatggaaacgaaaggagccggcgtgactttgaacgtgctcgagatgacgtcggaagatttggaaaatgccctgaaggctgtgatcaatgacaagtcctacaaggaaaacataatgaggctgtcgagcctgcacaaggatcggcctgtggaaccgctggacctcgcggtgttttgggttgaattcgtcatgcgccataagggcgctccacacctgaggcctgcggcacatgacttgacgtggtaccagtaccatagcctcgacgtcattgggtttctgcttgctgtggtgctgaccgtggcattcattacttttaagtgctgcgcctacggatacaggaaatgcctcgggaagaagggacgcgtgaagaaggcgcacaagtcaaagacccat

SEQ ID NO: 20810 - DNA, 1599 bp, synthetic construct
  misc_feature 1..1599: note = source = /note="Description of Artificial Sequence: Synthetic coding sequence"
  source 1..1599: mol_type = other DNA
atggctgtcgaatcgcaggggggtcgtcctctggtgcttggccttctgctgtgtgtgctcggcccggtggtcagccacgccgggaagatccttcttatccctgtggatggaagccattggcttagcatgcttggagccattcaacagctccaacagcgggggcacgagatagtcgtgctggctcctgatgcctcattgtacattcgcgacggcgccttttacacccttaagacgtacccagtgccgttccaaagagaggacgtgaaagaatcatttgttagcctcgggcacaacgtgtttgaaaatgattcctttttgcagcgcgtgataaagacctacaagaagattaagaaagattccgcgatgctgctgtccggatgttcacacctgcttcataacaaggagttgatggcaagcctcgcagagagctcgtttgacgtgatgctcactgatccctttcttccatgttcccctattgtggcacagtacctttcgcttccaactgtctttttcttgcacgcactcccctgttcactcgaatttgaagcaacgcagtgcccaaaccccttctcatatgtccctcgacccctgagcagccattccgaccatatgactttccttcaaagagtgaagaacatgcttatagcatttagccaaaacttcctttgtgatgtcgtgtactcaccatacgcaactcttgcatcggaatttctccagagagaagtcactgtgcaagatctcttgtctagcgcaagtgtgtggcttttcagatccgacttcgtcaaagattacccgcgtcccattatgccgaacatggtgttcgtgggtggtatcaactgccttcaccaaaaccccctgtcgcaagaattcgaagcatacattaacgctagtggagaacatggtatcgtggtgttttccctggggtcgatggtcagcgaaattcctgagaagaaagcaatggcaatagcggacgcacttgggaaaattccacagaccgttctgtggagatacaccggcacccggccctctaatctcgcgaacaataccattctcgtcaaatggcttccacaaaatgacctgctcggtcatcctatgacccgggcatttatcactcatgcaggttcgcatggagtgtacgagagcatatgcaacggagtgcctatggtgatgatgcctctgttcggcgatcagatggataatgcgaagcgcatggagactaagggggcaggggtcacccttaacgtgctcgaaatgacctccgaggatctcgaaaatgcactgaaagcagtcataaacgacaagagctacaaggagaacataatgaggctttcgtcactgcataaggaccgcccagtggagcctttggacctcgccgtgttctgggttgaatttgtaatgagacacaagggagcccctcacctgaggccagccgctcatgatcttacttggtaccagtatcactcgcttgacgtgattgggtttcttctcgcagtcgtgctgacggtggctttcattacctttaagtgctgtgcctatggttaccgtaaatgcttgggtaaaaagggtagagtcaagaaagcacacaaatctaagacgcac

SEQ ID NO: 20811 - DNA, 1599 bp, synthetic construct
  misc_feature 1..1599: note = source = /note="Description of Artificial Sequence: Synthetic coding sequence"
  source 1..1599: mol_type = other DNA
atggctgtggaatcccagggaggacggcccctggtgctcgggctcctgctttgcgtcctcgggcctgttgtaagtcatgctgggaaaatactcctgatccctgtcgatgggtctcactggctctccatgctgggggcaatacagcagcttcaacagaggggacatgaaatcgtggtgctggcacctgatgcctcactctatatcagggatggagctttctacacgttgaagacatatccagtacccttccagcgcgaagatgtgaaagaatcatttgtctccctaggacacaatgttttcgagaatgattcattcttgcagagagtgatcaaaacatacaaaaaaattaagaaagattctgctatgctactctctggatgtagtcatctgctccacaacaaagaactcatggcctcccttgccgaaagtagtttcgatgtgatgttaacagatccatttctaccctgttccccaatagtggcccagtatctgtcactaccaactgtcttctttcttcatgcactcccatgtagtttggagttcgaagccacacagtgtcccaacccattttcctatgttccccgaccactttcctctcattctgatcatatgactttcctccagagggttaaaaatatgcttatcgctttttcccagaacttcctgtgtgatgtcgtttactcaccctatgctactctcgcttcagaattcctccagcgggaagtgacagtgcaggatctgctgtcaagtgcttctgtatggctgtttaggtctgatttcgtgaaagattatccccgccctataatgccaaacatggtgtttgtgggaggaattaactgccttcatcagaaccctctttctcaggaattcgaagcctacatcaatgcctctggggaacacggaatagtcgttttcagtctcggatctatggtaagtgaaatacccgaaaaaaaagcgatggctatagccgatgctctcgggaaaatccctcagacagttctgtggcgatatacagggactagaccatccaatttagcaaacaatacaatccttgtgaagtggctccctcagaatgatctgctaggacatcctatgactcgcgcttttatcacacatgccggatcacatggggtatatgagagtatctgtaatggggttcccatggttatgatgcccctgttcggagatcagatggataatgctaaacggatggagacaaaaggggcaggggttactcttaatgttctcgaaatgacatcagaagatctagaaaatgcgctgaaagccgtcatcaatgataaatcatataaagaaaatataatgcggctatcatctctccataaagatcggcctgtggaaccattagatctcgctgtattttgggtggaattcgttatgcgacataaaggggcacctcacctacggcctgcggctcacgatctcacatggtatcaatatcattccttagacgttatcggatttctgctggccgtcgttctaacagtcgctttcatcactttcaaatgttgcgcttatgggtaccggaaatgcctggggaaaaaagggagggtaaaaaaagcccacaagtctaaaactcac

SEQ ID NO: 20812 - DNA, 1599 bp, synthetic construct
  misc_feature 1..1599: note = source = /note="Description of Artificial Sequence: Synthetic coding sequence"
  source 1..1599: mol_type = other DNA
atggcagtggagtcgcaaggtggacgacctctggtcctggggttgctgctgtgtgtccttggtcctgtcgtgagtcatgccggaaagattctgctgattcctgtggatggtagccattggctttccatgctgggagcaatccagcaattgcaacaaagaggtcatgaaatagtggtgctggcccccgacgcatccctctacatccgcgatggtgcattctacactcttaagacctaccccgtgccgtttcagagggaagatgtcaaagagtcgtttgtgagccttggtcataatgtctttgagaacgatagtttcctccagagagtcattaagacctacaagaagattaagaaggactccgcaatgctgctgagcggatgttcccatctgctgcataacaaagaacttatggccagcctggccgagtcgtcctttgatgtgatgctgaccgatccatttcttccgtgctcacctattgtggctcaatatctctcccttcctactgtcttttttctccacgccctgccatgctccctcgaatttgaagcaacgcaatgtcctaaccccttttcatacgtgccacggccactgagctcgcatagcgaccatatgacttttcttcaacgggtcaagaatatgctgattgcattttcgcagaactttctctgtgacgtggtctactcgccatacgcaactctggcatccgaattcttgcaaagagaggtgaccgtgcaagacctgctcagctcggcctcggtgtggttgtttcgctcagactttgtgaaagattaccccagaccaattatgcctaacatggtctttgtcggagggatcaattgtctgcaccagaatccactctcgcaggaatttgaagcctacatcaacgcctccggggaacacggaatcgtggtgttttccctcggtagcatggtgtctgagataccggagaagaaggccatggccattgccgacgcactgggaaagattcctcaaactgtgctctggcgatatactggtactagacctagcaatcttgcaaacaacaccatcttggtcaagtggctcccacagaatgatcttctcggacatcctatgaccagggcattcattacccacgccggctcccatggcgtgtatgagagcatttgcaacggtgtgccaatggtgatgatgcctctgttcggtgatcaaatggataacgcaaagaggatggagactaaaggagcaggggttactcttaatgtccttgaaatgacctcagaggaccttgagaatgcgcttaaggcagtcatcaacgataaatcatacaaggaaaacattatgcggctctcgtcgcttcataaagaccgcccagtggaaccacttgatctcgctgtgttttgggtggaatttgtgatgagacataagggggcaccgcacctgcgccccgcggcacatgatctgacttggtatcagtatcatagccttgatgtgattggctttcttcttgccgtggtcctgaccgtggctttcataaccttcaagtgttgcgcatacggataccggaaatgtctgggcaagaagggtagagtgaagaaggcacataaaagcaagacccat

SEQ ID NO: 20813 - DNA, 1599 bp, synthetic construct
  misc_feature 1..1599: note = source = /note="Description of Artificial Sequence: Synthetic coding sequence"
  source 1..1599: mol_type = other DNA
atggctgtggaatctcagggaggaaggccattggtgctggggctgctcttgtgcgtgttggggcccgtggtatctcacgcgggaaaaatactgctaattcccgtcgatggaagccactggttgtctatgctgggcgctatccagcagcttcagcagagagggcacgaaattgtggtactggcacccgacgccagcttatatattcgagacggggcgttttacaccctgaagacttatcctgttcctttccagcgtgaggacgtgaaggagtctttcgtttccttgggccataacgtgttcgagaacgacagctttctgcagagggtgattaagacttacaaaaaaattaaaaaagatagcgctatgcttctgtctggatgcagtcacctgctgcacaacaaagaactgatggccagccttgccgaaagctcttttgatgttatgctgacagacccatttttaccatgtagtccaatcgtggcacaatatctctcattgcctactgtgtttttcctgcacgctctgccatgttccctggagttcgaggcaacgcagtgcccaaacccattctcgtacgtccctcggcccttgtcatcccattcagatcatatgactttcctacagcgcgtcaaaaacatgctcattgccttttcgcagaatttcttgtgtgatgtggtgtactcaccgtatgcgactcttgcaagcgagttcctacagcgggaggtaaccgtgcaggacttgcttagctctgcttccgtatggctgtttaggtcagacttcgtgaaagattatccccggccaataatgccaaatatggtgttcgtgggcggtatcaactgcctccaccaaaacccgctgtctcaggaattcgaagcgtacatcaatgcatcaggggagcacgggatcgtggtgttcagcctaggttcaatggttagcgaaatccccgaaaaaaaagctatggcgatagctgacgcactgggaaagatacctcagacagtgctctggaggtataccggcactcgcccgtctaatctggccaacaacacaatcctggtcaagtggctccctcaaaatgatctactgggccaccccatgacgcgcgccttcatcacccatgctggctcccatggcgtatacgagtccatctgtaatggagttcctatggtcatgatgccactgtttggagaccagatggataatgctaagaggatggagactaaaggagccggagttaccctgaacgtgctggaaatgacaagtgaggacctggaaaatgcactcaaagccgtgatcaatgataagtcctacaaagagaacatcatgcgcttgtcatccctgcacaaagacagacctgtggagcccctcgacctcgcggtgttctgggtagagttcgttatgcggcataagggggcccctcatctccggccagccgcccacgatctgacatggtaccagtaccattctctggatgtaatcggctttctcctggctgtcgttttgacagtggcattcatcacgttcaagtgctgcgcctatggctaccggaagtgcttagggaagaaaggacgggtgaagaaggcacacaaatccaaaacacac

SEQ ID NO: 20814 - DNA, 1599 bp, synthetic construct
  misc_feature 1..1599: note = source = /note="Description of Artificial Sequence: Synthetic coding sequence"
  source 1..1599: mol_type = other DNA
atggccgtcgaatcccaaggggggaggccgcttgtcctgggtttgctcctctgcgtgctgggaccagtggtgtcccacgccggtaagattctgcttattccagttgatggctcacattggctttctatgctgggagcaattcagcaacttcagcagagaggacatgagattgtcgtgcttgcacctgacgcctctctgtacatcagagatggggcattttacactctgaaaacctaccctgtgccttttcaaagagaggatgtcaaagaatcatttgtgtcactgggtcacaatgtctttgaaaacgattcgtttcttcaacgggtgattaagacctacaagaagataaagaaggactcggcaatgctcctctccggttgttcgcatctgcttcacaacaaagaactgatggcgtcccttgccgaatcatcctttgatgtgatgcttaccgatcctttcctgccttgttcaccaatcgtcgcccaatacctttcccttccaactgtgttttttctgcatgctctcccatgctctttggaattcgaggccactcagtgcccaaacccattcagctacgtcccaaggcctctgtcatcgcatagcgatcacatgaccttcctgcaacgcgtgaaaaacatgcttattgcattttcacaaaactttctgtgtgacgtggtctactcgccttacgcaacgcttgcttcggagtttctgcaacgagaagtgactgtgcaagatttgctgagctccgcctccgtctggctgtttcgatccgattttgtgaaggactacccccggccaatcatgcctaacatggtgttcgtggggggcattaactgtctccatcagaatccattgtcccaggaattcgaagcgtacatcaatgcaagcggggagcatggtattgtggtgttttcacttggaagcatggtgtccgaaatccccgaaaagaaagcgatggcaattgcggacgcacttgggaaaattccccagactgtgctttggcggtacaccggaacgcgaccaagcaacttggccaacaataccattctggtgaagtggttgcctcagaacgacctccttggccacccgatgactagggcgttcataactcatgcagggtcgcatggcgtttacgaaagcatctgtaatggagtccctatggtgatgatgccactcttcggtgatcaaatggacaacgcaaaacgtatggaaaccaagggagccggcgtgaccctgaacgtccttgaaatgacttcggaggaccttgagaacgctcttaaggccgttatcaacgacaagtcctacaaggaaaacattatgagactgtcctccctgcacaaggaccggcctgtcgagccacttgatctggccgtgttttgggtggaatttgtgatgcgtcacaaaggtgcaccgcaccttcgtccagcagcgcatgaccttacctggtaccaataccatagcctcgatgtgattggcttcctgctcgctgtggtccttaccgtcgctttcatcacctttaagtgttgtgcttatggttaccgcaaatgtctgggaaagaaaggacgtgtgaaaaaggcacataagtccaagacccat

SEQ ID NO: 20815 - DNA, 1599 bp, synthetic construct
  misc_feature 1..1599: note = source = /note="Description of Artificial Sequence: Synthetic coding sequence"
  source 1..1599: mol_type = other DNA
atggctgtggaaagccaaggtggtaggcccctggtgctaggcctgctcttatgcgtcctagggcccgttgtgtctcacgccggcaagattctgctgattccagtagacggctcacactggctatcaatgctgggggccattcagcagctgcagcaaagagggcacgagatcgtggttttggccccggatgcatcattatacattcgcgacggcgctttttacaccctgaagacatacccggtgccgttccagagagaagatgttaaagagtcttttgtgtcactggggcataacgtcttcgaaaacgatagttttctgcagcgggtcatcaagacgtataagaagataaagaaggatagcgccatgctcctatctgggtgtagccacctgttgcataacaaggagctgatggcttcccttgccgagagcagcttcgacgtgatgctgacagatccattcctcccatgcagtcctatcgttgcccagtatttatcgttgccgactgtttttttcctccatgctctgccttgttctctggagtttgaagccacccagtgtcctaacccattttcctacgtgccccgtccccttagctctcacagcgaccatatgactttcctgcagcgggtgaagaacatgctcatagccttttctcagaatttcttgtgtgatgtcgtgtattctccctatgctaccttggctagcgagtttctccagagggaggtgaccgtacaggatctgttgagtagcgctagcgtttggttattcagatccgacttcgttaaggattatccaagacctatcatgcctaacatggtctttgtcgggggcattaactgcctgcatcaaaatccgctgagccaggagttcgaggcttatattaacgcctctggagaacacggcatcgtggttttctcacttgggtctatggtttcagagatcccggagaaaaaggctatggcaatcgcggatgctttgggcaagatcccccagactgtcctgtggcggtataccgggacgcgaccctctaacctggctaataataccatattagtgaaatggctcccccagaatgatctgctgggtcacccaatgactcgcgcctttatcacccacgccgggtcccacggagtttacgaatcaatttgcaacggggtgcccatggttatgatgcccctattcggtgatcagatggataatgctaagaggatggagactaaaggagctggtgtcacgctgaatgtcctcgagatgaccagcgaggatctggaaaacgccctgaaggcagtcatcaatgacaaatcctacaaggaaaatatcatgagacttagttcattacacaaagatcggccagttgagccactggatctggcagttttctgggtggaattcgtcatgagacacaaaggagcaccacacttaagacccgcagcccatgacttgacctggtaccagtatcatagcctggacgtcatagggtttctgctagccgtggttctcactgtggcattcattacctttaagtgttgcgcttatggctatcgcaagtgcttgggaaaaaagggtcgggtcaagaaagcccataagtctaagacgcat

SEQ ID NO: 20816 - DNA, 1599 bp, synthetic construct
  misc_feature 1..1599: note = source = /note="Description of Artificial Sequence: Synthetic coding sequence"
  source 1..1599: mol_type = other DNA
atggccgtggagagccaaggcggaagacctctcgttcttgggcttctgttgtgtgtgctgggacccgtggtatctcacgccggcaaaatcctgctaatccctgtggacggctctcactggctgagtatgctgggcgcaatacagcagttacagcagcgcggccatgaaattgtggtactagctccggatgcgtccttatacataagggatggcgctttttacacgctcaaaacatatcccgtgccttttcaaagagaggacgtgaaagagtcatttgtgagcttgggtcataatgtgttcgagaatgattcttttcttcaacgagtgatcaaaacctacaaaaaaatcaagaaggacagcgctatgctcctctccggttgctcgcaccttctacacaataaggaacttatggccagtctcgctgaatctagcttcgatgtcatgctcaccgaccccttccttccctgtagccccattgtcgcccagtacctgagcctccccacagtatttttcctgcacgctctgccctgttcgcttgagttcgaagccacccagtgtccaaacccctttagttacgttccacgacctctttcatcccactccgaccacatgacctttctacagcgtgtcaaaaacatgctcatagccttttcccaaaatttcttgtgtgacgtggtgtactctccttatgcgaccctggcttctgaattcctccaaagggaagttaccgttcaggacctgctatcatccgccagcgtgtggttgttcaggtctgacttcgttaaagactatccaaggcctattatgcccaacatggtctttgtgggcggaatcaactgtctccatcagaacccactgtctcaggaatttgaggcttatatcaacgctagcggtgagcacggtattgtggttttttccctgggcagcatggtgtccgagatcccggaaaaaaaagcaatggccatcgccgatgctctcgggaaaatcccccagaccgtcctttggcggtacacgggtactcggccctccaatctggcaaacaataccattctggtcaagtggctcccgcaaaatgatctcctcggtcaccccatgacgcgcgccttcattacacacgctggctctcatggcgtgtatgaatcaatctgtaacggcgtcccaatggtgatgatgccactttttggcgaccagatggacaatgcaaagcgtatggagacgaagggtgcaggggtgacgctcaatgtgctggagatgacctctgaggatctagagaatgccttaaaggccgtaattaacgataagagctacaaggaaaatatcatgcgccttagctctctgcacaaggatcgaccagtggagcccctggacctcgccgtgttttgggtggagttcgtgatgcggcacaagggagccccacacctgaggcctgccgcccatgacctgacgtggtatcagtaccatagcctcgatgtcattggtttccttttggccgtggtgctgaccgtcgcattcatcacgttcaaatgctgtgcatacggctataggaagtgccttggaaagaaaggcagggtcaaaaaagctcataagagtaaaacacac

SEQ ID NO: 20817 - DNA, 1599 bp, synthetic construct
  misc_feature 1..1599: note = source = /note="Description of Artificial Sequence: Synthetic coding sequence"
  source 1..1599: mol_type = other DNA
atggctgtggagtcgcaaggtggacggccgctggtgttgggactcctcctctgcgttctgggaccggtggtgtctcacgctggtaagatccttttgattccggtggacgggagccactggctgtcgatgttgggagcgatccagcagcttcaacagagaggacacgagattgtggtgctggcgcccgacgcgtcactgtacatccgggacggagctttctacactctcaagacctaccctgtgcctttccagagagaagatgtgaaggaaagtttcgtgtccctggggcacaacgtgtttgagaacgatagttttctgcagcgcgtcatcaaaacctataagaagatcaagaaggattcggcaatgctgttgagcggatgcagccatctgctgcacaataaggagctcatggctagcctggctgaatcgtccttcgacgtcatgctcaccgaccccttcctgccgtgctccccgatcgtggcccaatacctgagtctcccgactgtgttcttcctgcacgccttgccgtgctcgctggagttcgaggccacgcagtgcccaaatccgttttcctacgtgccccgcccgctgtcgtcccattccgaccatatgacgtttctccaacgcgtcaaaaacatgcttatcgccttctcacagaatttcctctgcgatgttgtctactcgccgtacgcgaccttggcctcagaattcctccagcgggaagtgacggtgcaagacctgctgagctccgccagcgtctggctttttaggtccgacttcgtgaaggactatccgaggccaatcatgccaaacatggtgttcgtgggcggcatcaactgcctccatcagaacccgttgtcgcaggaatttgaggcgtatatcaatgctagcggagaacacggcatcgtggtgttctccctgggctccatggtgtcagagattcccgagaagaaagccatggcaatcgcggacgcattgggaaagattccgcaaacggtgctttggcgatacaccggaactcggcctagcaacctcgcaaataacaccatcctcgtcaagtggctgccgcaaaatgatctgctggggcatcctatgacccgcgcttttatcactcacgccggatcccacggagtgtacgagtcgatttgcaatggagtgcccatggttatgatgccgctgttcggcgaccaaatggataacgccaagcggatggagactaaaggagcaggagtcaccctgaatgtgttggaaatgacttccgaagatctggagaatgctctgaaggcagtgatcaacgacaagtcctacaaagaaaacatcatgcgcctctccagcctgcacaaggatcgcccggtggaaccgctggacctcgccgtcttttgggtcgaattcgtgatgagacacaagggtgccccacatctgcgaccggcggcgcatgacctgacctggtaccaataccacagcctcgacgtgatcggattcctgctcgccgtggtgctcactgtggcgttcatcactttcaaatgctgcgcctacggatatcggaagtgcctggggaagaagggtcgcgtcaagaaagcccacaaatcgaaaacccat

SEQ ID NO: 20818 - DNA, 1599 bp, synthetic construct
  misc_feature 1..1599: note = source = /note="Description of Artificial Sequence: Synthetic coding sequence"
  source 1..1599: mol_type = other DNA
atggctgtggagtcccagggaggtcgaccgctggtcttaggtctcttgctttgcgttttgggtccagtagtctcccatgctggaaagattttgttaatacctgttgatggatctcactggttatctatgctaggagctattcaacaactgcaacagcgaggacatgaaattgtagttttagctccagatgcttccttatatattagagacggagctttttacacccttaagacttaccccgttccgtttcagcgtgaagacgttaaggagtcattcgtttcattgggccataatgtttttgaaaatgattcgttcctgcaacgcgttatcaaaacatacaaaaagattaaaaaagattcagccatgctactgtcgggatgctctcatctcttgcataataaggaattgatggcgagtctagcagaaagttcctttgatgtcatgcttacagatccattccttccatgctcgcccatcgtagctcaatatctttcactcccaactgtttttttcttgcacgcattaccatgttctcttgagttcgaggccacacagtgcccgaatccttttagctatgtgccccgaccgttgtcatcacactccgaccatatgacctttcttcagcgtgttaaaaacatgcttattgccttcagtcagaatttcctttgtgacgtggtatattcgccctacgcaactcttgcttcagagtttctacaaagagaagtcactgttcaggatttacttagttcggcttccgtttggctcttccgctctgatttcgtgaaagattatcctcgacccattatgcctaatatggtttttgtcggaggcataaactgtcttcaccaaaatccgctatcgcaagagtttgaagcatatattaatgcttcaggagaacatggcatagtggttttctccctcggatcaatggtatcagaaattcccgaaaaaaaagcaatggcgattgcagatgcccttggaaaaatcccccagactgttctttggcgatacacagggactagaccgagtaatctcgccaacaacacaattctcgttaaatggctgccacagaatgatttgctaggtcatccgatgaccagggcattcattacgcacgctggatcgcatggagtgtacgagagtatctgcaatggtgttccaatggtaatgatgccactttttggcgatcaaatggataatgccaagcgtatggaaacgaagggagctggggttactttgaacgtgctggaaatgacatccgaagaccttgagaacgctctcaaggcagttatcaatgataaaagctataaagaaaatatcatgcgcttgtcttcacttcacaaagatagacctgttgagccgctcgaccttgctgtattctgggttgaatttgtgatgcgacacaaaggcgcaccacatttacgtccagcagctcacgatcttacgtggtaccaatatcacagtcttgatgtcatcggattccttttggcggtagttttgacagttgctttcattacgtttaagtgttgtgcgtacggatacagaaaatgtttgggaaagaagggtagagttaaaaaagctcataagtcaaaaacccac

SEQ ID NO: 20819 - DNA, 1599 bp, synthetic construct
  misc_feature 1..1599: note = source = /note="Description of Artificial Sequence: Synthetic coding sequence"
  source 1..1599: mol_type = other DNA
atggccgtggaatctcagggaggacgcccactggtcctgggcctgttgttgtgcgtgctcggccctgtggtgtcccacgcgggcaaaattctcctgatcccggtggacggctcccactggctcagcatgctgggggcgatccagcaactgcagcagcgcggacacgagatcgtcgtgctcgctcctgacgcgtcgctgtacatacgtgacggggcgttttacactctgaaaacttacccggtcccgttccagcgggaggacgtcaaggaatcattcgtctcactcggacacaacgtgttcgagaatgactcgttcctccaacgggtcatcaagacctataagaagattaagaaagacagcgccatgctcctgtctggttgttcccacctgctccacaacaaagaactgatggcctccctggccgagagctcatttgacgtgatgctcaccgacccattcctgccttgttccccgatcgttgctcagtacctgtcgcttcccactgtgttcttcctccatgccctcccgtgcagcctcgagttcgaagctactcaatgcccgaacccattcagctacgtgccaagaccgctttcatcgcattcagatcacatgacgttcttgcagcgggtgaagaatatgttgatcgctttctcacaaaactttttgtgtgacgtggtgtactccccgtacgcaactctggccagtgagtttctgcagcgtgaagtgacggtgcaggacctgctttcgtcagcttcggtgtggctgttccgctcagacttcgtgaaagattaccctagaccgatcatgccgaatatggtctttgtcggtgggatcaactgcttgcatcaaaatcctctgtcacaggagttcgaggcctacatcaacgcgtccggagaacatgggatcgtggtgttttcactgggaagcatggtgagcgagatcccagaaaagaaggctatggcgatcgcggacgcgctgggaaagatcccgcaaaccgtgctgtggaggtacaccggaactaggccgtcgaaccttgcaaataacacgatcctggtcaagtggctgccgcaaaatgatctcctgggccaccctatgactcgggccttcattacccatgccggtagccacggagtctatgagtccatctgcaacggagtgccaatggtgatgatgccgctgttcggagatcagatggacaatgccaaaagaatggaaaccaagggggcaggtgtgacgctgaacgtcctcgaaatgacctccgaggacctcgagaacgctctgaaggctgtgatcaatgacaaatcgtacaaggaaaacattatgcgactgtcctccctccacaaggatcgccctgtggaaccactcgatcttgcagtattctgggtggaattcgtgatgcgccataagggggcgccgcacctgcggcccgctgcacatgatctgacttggtaccagtaccatagcctggatgtgatcggattcctcctcgcggtggttctgactgtggcgttcatcacttttaagtgctgcgcctacggataccgcaagtgcctggggaagaaagggcgtgtgaaaaaggctcataagtcgaaaacgcat

SEQ ID NO: 20820 - DNA, 1599 bp, synthetic construct
  misc_feature 1..1599: note = source = /note="Description of Artificial Sequence: Synthetic coding sequence"
  source 1..1599: mol_type = other DNA
atggcagtcgaatcacaaggagggcggcctttggtgctgggtctgctgctgtgtgtcctcggcccagtcgtgtcacatgcaggcaagatacttcttatccctgtggatgggtcccattggctgtcgatgcttggagcaattcaacaacttcagcagcgggggcatgagatcgtggtgctggcccctgacgcatccctgtacatcagggatggagcgttctacaccctgaaaacgtaccctgtgcccttccagagggaggacgtgaaggagtcattcgtgtccctgggacataacgtgtttgagaacgactcctttcttcagagagtgataaagacttacaagaagatcaagaaggattcggcaatgctgctctcgggatgcagccatcttctgcataacaaagaattgatggcctcactggcagagtccagctttgatgtgatgcttaccgatccattcctgccctgtagccctattgtggcacaataccttagtctgcccactgtgttctttttgcatgcacttccttgttctctcgagttcgaggcaactcaatgcccgaacccattcagctacgtgccacggccacttagctcccattcagatcatatgacttttctgcagcgggttaagaatatgctcattgcattttcgcaaaactttctctgtgatgtggtgtactccccatacgccacccttgcatccgaatttctccagagggaagtgaccgtgcaggacctcctgagcagcgcatccgtgtggctttttagatcagatttcgtcaaagactaccctaggcctattatgcctaatatggtgtttgtgggtggtatcaactgcttgcaccaaaatccactctcccaagaattcgaagcatacattaatgcatcgggtgaacatggaatcgtggtgttcagcttgggaagcatggtgtcagaaattcccgagaagaaagcaatggcaatagcggacgcacttggcaagattccccagactgtcctgtggcgttacactgggaccaggccaagcaacctcgccaacaacaccattcttgtgaagtggctgccgcagaacgacctcctcggtcatcctatgactcgagcattcataacgcatgccggctctcatggcgtgtatgaatcgatttgcaacggtgtcccaatggtcatgatgcccttgttcggcgatcaaatggacaatgcgaaacggatggaaactaagggagccggggtgacccttaatgtgctcgaaatgacttcggaagatcttgagaacgcacttaaggccgtcattaatgataagagctataaagaaaacattatgaggctgagctcactccacaaggatcgtccagtcgaaccactggacctggcagtgttctgggtcgaatttgtcatgcgtcataagggcgcacctcatttgaggccagcggctcatgaccttacctggtatcaataccattccttggatgtgattggctttctccttgccgtcgtgctcaccgtggcgtttatcacctttaagtgctgtgcctacggttacagaaaatgtctgggaaagaaaggccgcgtgaagaaggcgcacaaaagcaagacccat

SEQ ID NO: 20821 - DNA, 1599 bp, synthetic construct
  misc_feature 1..1599: note = source = /note="Description of Artificial Sequence: Synthetic coding sequence"
  source 1..1599: mol_type = other DNA
atggccgttgagtcccagggaggtcgtccactggttctgggactgctcttatgcgttttgggacctgtggtgtcacacgccggtaagatcctgcttattcctgtcgatggttcccattggctcagcatgctgggagccattcagcagctgcaacagcgggggcatgagatcgtagtccttgcgccagatgcctctctctacatcagagacggagccttctatactctaaaaacctaccccgtcccctttcagagagaggatgtgaaggaatctttcgtgtccctggggcataacgtcttcgagaacgactcctttctccagcgtgtgatcaagacctacaaaaagatcaaaaaagacagcgccatgctgctgtccggatgctcgcatttgctgcataacaaggagctgatggctagcctggctgagtcctcctttgacgttatgttgacagatcccttcctcccatgtagtccaatcgtcgctcagtatctgagcctgcctacggtgtttttcttgcatgctctgccatgctcattagagttcgaagcaacccagtgccctaatccttttagctatgtgccaagacctctttcgtctcactcagatcacatgacgtttttgcagagagtgaagaacatgctgatcgcctttagtcagaacttcctctgtgatgtggtgtactccccctatgcaaccctggctagcgaattcctccagcgcgaggtgaccgtgcaggatctcttaagtagcgcatcggtctggctgttcaggtctgacttcgttaaggactaccctcgccccatcatgcccaatatggtgttcgtgggtggaatcaactgtctgcaccagaatcctttgtctcaagaattcgaagcttacatcaacgcgagtggcgagcacggaatcgtggtcttctcactgggtagcatggtaagtgaaatccctgagaagaaggcgatggccatcgctgatgcactaggaaagatcccccagacagtcctgtggaggtacacggggacacgcccctctaatctggctaacaacaccatattggtgaagtggctcccccagaacgacctgctgggtcaccctatgacccgtgctttcatcacccacgccgggtcccatggggtgtatgagagcatctgtaacggtgtgccaatggtgatgatgcccctgtttggggatcaaatggataatgccaaaaggatggagactaagggcgctggcgtaacactgaacgtgctggagatgactagcgaggatttagagaacgcactaaaggccgtcattaatgacaagtcttataaagaaaacataatgaggctatcaagccttcacaaggatcgtccggtagaacccctggaccttgccgtcttctgggtagaattcgtgatgagacataaaggcgcacctcatctccggcccgccgctcatgacctgacttggtatcaatatcatagtttggatgttataggctttctgttggcagtggtcctgacggttgcctttatcacttttaagtgttgcgcatatggttatcgtaagtgcctcgggaaaaagggcagggtgaagaaggcccataagagcaagacacac

SEQ ID NO: 20822 - DNA, 1599 bp, synthetic construct
  misc_feature 1..1599: note = source = /note="Description of Artificial Sequence: Synthetic coding sequence"
  source 1..1599: mol_type = other DNA
atggctgttgagtcccaaggcggccggccccttgtcctgggacttctgttgtgtgtgctgggacctgtggtaagccatgccgggaaaatcctcctgataccggtggacggctcccattggctgagcatgctgggtgcaatccagcaactccagcaaagggggcacgaaatcgtggtcctggcaccagacgcatccctatacatcagagatggggcattttatacactgaaaacgtatcccgttccctttcaacgggaagatgtcaaggagtccttcgtcagcctcgggcacaatgtatttgaaaacgactctttcctccagcgagtaataaaaacctataaaaagattaagaaagattccgcgatgctgctgagcggctgctctcacctgttgcacaacaaagagctgatggcatcattggccgagtcctcctttgacgtgatgctgactgatccatttctcccatgcagtccaattgtggcacagtacctgtccctgcccactgtgttcttcttacatgcgctgccttgcagcctcgagtttgaggccacacagtgccccaaccccttctcctacgtccctcgccctctttctagccattccgaccatatgacgttcttgcagcgtgtgaaaaatatgctcattgccttctctcagaatttcctttgtgacgtggtctatagcccttatgctactctggccagcgagttcttgcagcgcgaggtgacagtgcaggatctcttgtcatccgcatcagtgtggctgttcaggagcgacttcgtgaaggattatcctaggccaatcatgccaaacatggtgtttgtgggaggaatcaattgtttgcaccagaaccccttgtcacaggaattcgaagcttacataaacgcctccggagaacacggcatcgtcgtgttttcgctcggatcaatggtgagtgagattcccgagaaaaaggcaatggctatcgcggatgccctaggcaagattccccagactgtactgtggcggtacacaggaacaagaccctcaaacctagcaaacaacacgatcctggtcaaatggctcccacagaatgatctgctgggccaccctatgactcgagcgtttatcacccacgccggcagccatggggtttacgaatccatctgcaatggagtgcctatggttatgatgccgctatttggagaccaaatggacaacgccaagagaatggagacaaagggcgccggagtgaccttaaacgtgctcgagatgacgagtgaagacctcgaaaacgcattgaaggcagtgattaacgataagtcttacaaagaaaacattatgcgtctatcaagtctgcataaggatcgtcctgttgaacctttggaccttgcagtgttttgggttgaatttgttatgcggcacaaaggcgcgccccacctaagaccagccgctcatgatctgacgtggtatcagtatcactcgttggacgttattgggttcctcctcgcagttgtgctgactgtagcgttcattacattcaaatgctgtgcttacggctaccggaagtgtctgggaaaaaagggacgagtgaaaaaggctcacaaatcaaagacgcac

SEQ ID NO: 20823 - DNA, 1599 bp, synthetic construct
  misc_feature 1..1599: note = source = /note="Description of Artificial Sequence: Synthetic coding sequence"
  source 1..1599: mol_type = other DNA
atggctgttgaatctcaaggaggcaggccactggtcctgggtctgctcctttgcgtactgggccctgtcgtgtctcatgccggcaagatcttgctcattcctgtggacggctcccactggctgtcaatgttgggtgctattcaacagctgcagcagcgcggacatgagattgttgtgctggctccagacgcttcactttacattagggacggcgcattttataccctcaaaacctatcctgtacccttccagagggaagacgtcaaagaatccttcgtgtctttgggccataacgttttcgagaatgatagttttctgcagcgtgttataaagacctacaagaagattaagaaggatagtgccatgctcctttctggttgcagccatctgctccacaacaaggagctgatggcctcactggccgaatcttcttttgatgtcatgctgactgatccttttcttccatgttctcccatcgttgcccagtatctgagcttgcccactgttttctttctgcacgcattgccctgttcattggagttcgaggcaactcagtgtcccaacccattttcatacgtgccacgtcccctgtccagccatagcgatcacatgacattccttcaaagagtgaaaaacatgctcattgctttctctcagaatttcctctgtgacgtggtctatagcccatatgctacacttgcttctgaattcttgcaacgtgaagtcacagttcaagatctgctgtcttccgctagtgtatggctcttccgctctgactttgtgaaggactatcccagacccatcatgcccaacatggtcttcgtgggtggcatcaattgtctgcaccaaaacccactcagccaagagtttgaagcatatatcaatgcttccggagagcatggtatcgtagtgttctctctgggctctatggtatccgagattccagagaagaaggccatggccatcgccgacgctctgggtaagattccacaaactgtgctgtggaggtacaccggtacacgtcctagcaacctggccaacaacaccattctggtaaagtggttgcctcaaaacgatctgctcggacaccccatgaccagggcctttattactcacgccggatcacatggtgtatacgaaagcatatgcaacggtgtccccatggttatgatgccactgtttggcgatcagatggacaacgccaagcgcatggagacaaagggagccggtgtaacactcaacgtgctggagatgacaagcgaggatttggaaaatgccctgaaggctgtcattaatgataagagttacaaagaaaacatcatgaggttgagctctctccacaaggatagacctgtggaacctttggatctggctgtgttctgggtggagttcgttatgagacataagggcgctccccatcttcgccctgccgctcatgatttgacctggtatcaatatcacagtctcgatgttattggattcctgctggctgttgtgttgaccgtcgcattcatcactttcaaatgttgcgcctatggctacaggaagtgcctgggaaagaagggcagagtaaagaaagctcacaaatccaaaacacac

SEQ ID NO: 20824 - DNA, 1599 bp, synthetic construct
  misc_feature 1..1599: note = source = /note="Description of Artificial Sequence: Synthetic coding sequence"
  source 1..1599: mol_type = other DNA
atggccgtggagtcacagggcggacggccgctcgtgctcgggttgctgctgtgcgtcctgggaccggtggtgtcccacgccggcaaaattctgctgattccggtcgacggttcgcactggctctcaatgcttggggccatccagcagctgcaacagcgcggacacgagattgtggtcctggccccagatgcgtccctctacatccgcgacggtgctttctacactctgaaaacttacccggttccgttccagcgggaggacgtcaaggagagtttcgtgtccctgggacacaacgtgtttgagaatgattccttccttcagcgcgtaatcaagacttacaagaagattaagaaagactcggctatgctgctgtcggggtgctcgcatctcctgcacaataaagagctcatggcctcgctcgctgaatcgtcatttgacgtgatgctgaccgacccattcctcccatgttcgccaatcgttgctcagtacctctcgctcccgactgtctttttcctgcacgccctgccgtgttcgctggaattcgaggccactcaatgcccaaaccctttttcctacgtccctaggccgctcagctcacattcggatcatatgacctttcttcagcgggtgaagaacatgctgatcgccttctcccagaatttcctctgcgatgtcgtgtacagcccgtacgcgaccctggccagcgaattccttcaacgggaggtgacggttcaggacctgctctcttcagcaagcgtgtggctgttccggagcgacttcgtgaaggactacccccgccctattatgccgaatatggtctttgttggaggaatcaactgcctccaccagaacccgctctcacaggagttcgaggcatacatcaacgcctcaggagaacacggaatcgtcgtcttttctctgggctcgatggtgtcggagatcccagaaaagaaagctatggccatcgcagacgcgctgggaaagatcccgcaaaccgtgctgtggcgctacactggcaccagaccatccaatctcgcgaacaacactattctcgtgaagtggctgccacagaacgacctgctgggacacccgatgactagagcgttcataactcacgctggaagccatggggtgtacgaatccatctgtaacggtgtgccaatggtaatgatgcccctgttcggggatcagatggataatgccaagagaatggaaactaagggtgccggtgtgactctgaacgtgttggaaatgacgagcgaggacctggaaaacgcgctcaaggccgtcatcaatgacaaaagttacaaggaaaacatcatgagactctcttccctgcacaaagaccgcccagtggagccccttgaccttgccgtgttttgggtcgagttcgtgatgaggcataagggcgccccacacttgcgcccggcggcgcatgacctgacttggtaccagtaccacagcctggatgtgatcggcttcctcctggctgtggtcctgaccgtggcattcatcaccttcaagtgctgcgcctatggttacaggaagtgcctgggaaagaaagggagggtgaaaaaggcccataagtccaagacccat

SEQ ID NO: 20825 - DNA, 1599 bp, synthetic construct
  misc_feature 1..1599: note = source = /note="Description of Artificial Sequence: Synthetic coding sequence"
  source 1..1599: mol_type = other DNA
atggccgtggagagtcaggggggtcgacccttggttctgggcttgctgttgtgcgttctagggcccgtggtgagccacgcaggtaaaatacttctcatcccagttgacggcagccactggctctcaatgctgggagccattcaacagttgcagcagcggggtcatgagattgtcgtgttagcccccgatgcttccttgtacattagagatggcgccttttacactctcaaaacctatccagtacctttccagcgcgaggacgtcaaagaaagcttcgtgagtctagggcataacgtttttgagaatgattcctttttgcagagagtcataaaaacctacaaaaagattaagaaggattccgccatgttgctttccggctgctcccacctgcttcataataaggagctgatggctagcctcgccgagtctagttttgatgtcatgttaactgacccttttctgccttgtagccccatagtggcgcaatatctgtcgctaccaacagtcttttttctccatgcccttccgtgctccctggagtttgaggcaactcagtgccctaaccccttttcgtatgtcccgagaccattgtcctcccactccgatcacatgacttttctacaaagagtcaaaaatatgttgatcgccttcagccagaacttcctgtgcgacgtggtgtatagtccatacgcaaccctggccagtgagtttctgcaacgcgaggtaaccgtgcaagatctactgtcttctgcaagcgtgtggcttttcagatccgattttgtaaaagattaccctcggcccataatgcccaatatggtctttgtgggcggtattaactgcctccatcagaatcctctgagtcaggaatttgaagcctatattaatgcaagcggcgagcatggtatcgtagtgtttagcctcggttctatggtgtccgaaatccccgagaagaaggctatggctatagctgacgcattaggcaagatccctcagacagtgctgtggcgatacaccgggactcgaccatctaatctggctaacaacacgattcttgtcaaatggctgccgcagaacgatttactggggcatcctatgacccgggcattcattactcatgccggcagccacggcgtttatgagtctatatgtaacggcgtgcctatggttatgatgcccctgtttggagaccagatggacaatgcgaaaaggatggaaactaaaggcgctggggtgacactgaacgtgctcgagatgacctctgaggatctggaaaacgctctgaaagctgtgattaatgacaagagctacaaagaaaacatcatgagactgtcctctcttcacaaggatcgcccagtcgagcccctggatctcgcagtcttttgggtggagtttgtgatgagacataaaggagccccacatctgagacctgccgcgcacgatctgacctggtatcagtaccattctctcgatgtcatcggatttttgttggcagtcgtgcttacggtcgccttcattacttttaagtgctgcgcctacgggtaccgcaaatgcctggggaagaaaggcagagtaaaaaaagcccacaagtccaaaactcac

SEQ ID NO: 20826 - DNA, 1599 bp, synthetic construct
  misc_feature 1..1599: note = source = /note="Description of Artificial Sequence: Synthetic coding sequence"
  source 1..1599: mol_type = other DNA
atggcagttgagagccagggaggtaggcctctcgtgctagggctcctgttgtgcgtcctgggaccagtcgtgagccacgccgggaaaattttgcttattcccgtagacgggtctcactggctctccatgctaggagccatccagcagctgcaacagagagggcacgagatcgtggtgctcgcccctgatgcctcactgtacataagagatggggctttttatacccttaaaacatatccggtcccctttcaaagagaagatgttaaggagtcgttcgtaagtctgggccataatgtcttcgaaaacgactctttccttcagagagttatcaagacatataaaaagataaagaaagattccgctatgctgctgagcggatgtagccatctgctgcataacaaggagctcatggcgtcattggcggaatcttcctttgacgtaatgttgacagatccattcctaccatgttcgccgattgtggcccagtatctgtctctgccaactgtcttctttttacatgccttaccctgcagtctcgaattcgaggcgacacagtgccctaatcctttctcctatgtgcctcggccactcagttctcattccgatcatatgacctttttacaacgtgttaagaatatgttgattgctttctcgcagaattttctgtgcgatgtagtgtactctccatacgcgaccctggcaagcgagttcctgcagagagaggttacagtgcaggatctgctcagcagcgccagcgtctggctgttcaggagtgattttgttaaggactaccccagaccaatcatgcccaatatggtgttcgtgggcggcattaactgtctacaccagaatcccctttcccaggaattcgaggcttacataaacgcctctggagagcatgggattgtggtcttctccctgggcagtatggtatctgaaatacctgagaagaaggccatggccatcgctgacgcacttggaaagatcccgcagactgtcctatggaggtatactgggactcggcctagtaacctcgcaaataacacaatacttgtgaagtggctgccccaaaatgatctcctggggcacccaatgaccagggcctttattacccacgccgggagccatggggtctacgaatcgatttgcaacggcgtccctatggtaatgatgccgctgttcggtgatcagatggacaacgctaagaggatggagactaagggcgctggcgtgactcttaatgtgctggagatgacgagcgaagacctcgaaaatgcattgaaggccgtgattaacgataaatcctataaagagaacatcatgagactttcttctcttcataaagaccggcccgtggaaccattggatctggctgtattttgggtcgaattcgtcatgcggcacaagggcgctcctcatctccgacccgcggcccatgacttgacgtggtatcagtaccacagtcttgacgtgatcgggttcttgctggcagtggtcctgaccgtggcgtttatcacctttaagtgctgtgcatatgggtaccgaaagtgtctcggcaagaaagggcgtgtgaagaaggcccacaaaagtaagacccac

SEQ ID NO: 20827 - DNA, 1599 bp, synthetic construct
  misc_feature 1..1599: note = source = /note="Description of Artificial Sequence: Synthetic coding sequence"
  source 1..1599: mol_type = other DNA
atggccgtggaaagtcagggcggcaggccacttgtcctcgggctgttgctgtgcgtgctcggccccgtggtgtcacatgcgggaaagattcttttaatccccgtggatggaagccactggctgagcatgctgggcgcgattcagcagctccagcaaaggggtcacgagatagttgtgctggcccctgacgccagcctatacatcagggatggagccttctataccttgaagacctaccctgttccctttcagagggaagatgtgaaggagagcttcgtaagtctcggacacaatgtgttcgaaaacgactcttttctgcagagggtcattaagacctataagaagattaaaaaggactccgccatgctgctgtctggttgctcccacctgctgcataacaaggaactcatggcctcattggccgagagttccttcgacgttatgctcacagatccattccttccatgctcacccatcgtggcccagtacctgtcattaccgacagtgtttttcctgcacgccttgccgtgtagtctggaattcgaggcgacacagtgtcccaatccgttttcctatgtgcctagacccctttcaagtcatagtgaccatatgaccttcctgcagcgggtcaagaatatgttgatcgcattttcgcagaacttcttgtgtgacgtggtgtattccccatacgcaacactagccagtgagttcctgcaacgtgaagtgactgtccaagacctcctgtcttccgcttcggtttggttattccgctctgactttgttaaggactatcctcgtccaatcatgcctaacatggttttcgtcggagggatcaattgtctccaccaaaaccctctttctcaggaatttgaggcctacatcaatgctagcggtgaacatgggatcgtggtcttttcactagggagcatggtcagtgagatcccagagaaaaaggcaatggccattgccgatgcgctaggaaagatcccacaaaccgtcctatggcggtacaccggcactaggccctccaacctagctaacaatactattctggtaaagtggctcccgcaaaatgatctcctgggccaccctatgactagggcttttatcacacacgccggctcacatggagtctatgaatctatctgtaatggggtgccaatggtaatgatgcccctgtttggggatcagatggataatgctaaaaggatggaaacgaagggggccggcgtgaccttgaatgtgctggagatgactagtgaggacctcgaaaatgctttgaaggctgtgatcaatgacaaatcttacaaagaaaacataatgcgactgtcctccctgcataaagataggcccgttgaacctttagatttggccgtcttttgggtggaattcgtgatgcgccataagggtgctccgcacttgcgccccgcggctcatgacttaacttggtatcagtaccactccctcgacgttattggctttttgctagccgtggtactcacggtggccttcatcacattcaagtgttgcgcatatggttatcggaaatgcctcggtaaaaaggggagggtcaagaaagcccacaaatctaaaacccac

SEQ ID NO: 20828 - DNA, 1599 bp, synthetic construct
  misc_feature 1..1599: note = source = /note="Description of Artificial Sequence: Synthetic coding sequence"
  source 1..1599: mol_type = other DNA
atggcggtcgaaagccaggggggacggcctctggtgctgggcttgcttctttgtgtgctggggcccgttgtgtcacacgctggaaagatcctcctcattcctgtggatgggtcacattggctgtcgatgctgggcgcgatccaacagctgcagcagaggggccatgaaattgtggtccttgcacccgatgcctcgttgtacattagagatggtgccttttacactcttaagacgtaccccgtgccttttcaaagagaagatgtcaaggagtcctttgtgagccttggacataacgtctttgaaaatgattccttccttcaaagggtgataaagacttacaaaaagattaagaaggattccgccatgttgcttagcggctgctcacacctgctgcataacaaagagctgatggcatcgctggcagaatcttcttttgacgtgatgctgaccgacccattcctgccttgttcacctatcgtcgcacagtacctgtcgcttccaactgtgttctttttgcatgcactgccctgttctctggagtttgaggcaacccagtgtcctaatccattcagctacgtcccacggccactttcgtcgcacagcgaccatatgacgtttctccagagagtcaagaacatgctgattgcattctcccagaactttctttgcgatgtggtgtactccccctacgccaccctggcgtcggaattcctgcaacgcgaagtgacggtccaggatttgctctcgtcagcaagcgtgtggctgtttcgatcagattttgtcaaagattacccaaggccgattatgcccaacatggtgtttgtgggtgggattaactgcctgcatcaaaacccactctcacaagaattcgaagcatacatcaatgcatcaggtgagcacgggattgtcgtgttttccctgggttcgatggtgtcggagattcctgaaaagaaagcaatggcaatcgcagacgcacttggtaagattccccagactgtgttgtggagatacacggggactagaccaagtaatctcgctaataacactattctggtgaagtggctgccgcaaaacgatctgcttggacatccaatgacccgggcttttatcacccacgcgggatcccatggcgtgtacgaaagcatttgtaatggtgtgccaatggtcatgatgcctctttttggagatcagatggataacgcaaagagaatggagactaagggtgcaggtgtgactcttaacgtcctggagatgacctcagaggaccttgagaatgcattgaaggcggtgattaacgataaaagctacaaggaaaacattatgaggctctctagccttcacaaggatcggcctgtggaacccctggatttggccgtgttttgggtggaatttgtcatgaggcataaaggcgcaccccacctccgccctgcggcgcatgatctgacttggtaccaataccactcgctggacgtcatcggatttctgttggcagtggtcctgaccgtcgctttcattactttcaaatgttgcgcttacggatatcgcaaatgtctgggaaaaaagggtagagtcaaaaaggcacacaaatccaagactcat

SEQ ID NO: 20829 - DNA, 1599 bp, synthetic construct
  misc_feature 1..1599: note = source = /note="Description of Artificial Sequence: Synthetic coding sequence"
  source 1..1599: mol_type = other DNA
atggccgtcgagagccagggggggcggcccctagtcctgggccttctcctgtgcgtgctgggcccagtggtttcacacgcagggaaaatcctacttattcctgtggacggctcacactggctctcaatgctgggggcaatccagcagctgcagcagcgaggacatgagatcgtcgttctagctccagatgcgtccctgtatattagggacggagccttctacacgctgaagacgtatcccgtgcccttccagagagaggacgtgaaagaatcatttgtatccttagggcacaacgttttcgaaaacgattctttcctccagcgtgtcattaaaacctataaaaaaatcaaaaaggactcggcgatgttattgtctggatgcagccatctactgcacaataaggaactgatggcctccctcgccgagagctcatttgacgtcatgctaacagaccctttcctaccgtgttcaccaatcgtcgctcaatatctttccttgccaacagtgttctttttgcacgccctcccttgttctctggagttcgaggctacccagtgcccaaatccattctcctacgttcctcggcctttgagctcccattccgatcacatgaccttcctgcagagagttaaaaacatgttgatcgcgttctcacagaacttcctctgtgatgtagtatacagcccatatgcgacgctggctagtgagttcttacagagggaagtgacagtccaggaccttctaagctctgccagtgtgtggctgtttcgctcagactttgttaaggattacccaaggccgattatgcccaacatggtgttcgtgggcggtatcaattgcctccatcagaaccctctctcacaggagtttgaggcatacataaacgcctccggcgagcacgggatcgtggtgttcagcctcggaagcatggtctccgagattcctgagaaaaaggcgatggcgattgctgacgctctgggcaagatcccacagactgtgctgtggaggtacacaggtacacggccctccaatcttgctaataacaccatcctggtgaaatggctcccccagaacgaccttctcggccaccccatgactcgggcattcatcacacacgccggttctcacggcgtgtacgagagcatatgtaatggcgttccgatggtcatgatgccgctctttggcgaccagatggacaatgctaagcggatggagacaaagggcgccggcgtaacactcaatgtgcttgaaatgacctccgaggacctagaaaacgctctgaaggcagttatcaacgacaagagttataaggaaaacattatgcggctgtcaagtttgcataaagaccgtccagtcgagcccctggatcttgcagtgttctgggtggagttcgtcatgaggcataaaggtgcccctcatctgcggcctgctgcccatgatctgacctggtatcaatatcattccctggacgtgattggttttcttctggcagtcgtcctgacagtggcttttatcaccttcaagtgttgcgcttatggttataggaagtgtctgggaaagaaaggacgtgtgaagaaagcccacaagtctaagacacac

SEQ ID NO: 20830 - DNA, 1599 bp, synthetic construct
  misc_feature 1..1599: note = source = /note="Description of Artificial Sequence: Synthetic coding sequence"
  source 1..1599: mol_type = other DNA
atggcagtggagtctcagggtggaaggccgctagtccttggtctcctgctctgcgttcttggtcctgttgttagtcacgctggaaaaatattgctaatcccagttgatggatctcattggctgagcatgcttggagcaattcaacaactgcagcaaaggggacatgagatagttgttctggctcctgacgcttctttgtatattcgagatggagctttctatacgcttaaaacttatcctgtcccgtttcaacgtgaagacgttaaggagagctttgtgagcttgggacataatgtatttgagaatgactcttttttacaaagagtgattaaaacttataaaaagataaagaaggattctgccatgttgcttagcggttgttctcatctactgcataataaggaactcatggcaagccttgcagagtcttcattcgacgtaatgctaaccgatccctttttgccatgctcaccaatagttgcacaatacctgtccttacctaccgtcttcttcttacatgctttgccttgctcactcgagttcgaagctacccaatgtcccaacccatttagctatgtaccgagacccttgtcgtcgcattctgaccacatgacatttctgcagagagttaaaaacatgcttatcgctttttcccagaattttttgtgcgacgtagtgtactctccgtacgctactttagctagcgagtttctgcaaagagaagttacagtacaagatttactatcctcagcatcggtatggctattcagaagtgattttgttaaagattatcccagacctatcatgcctaatatggtgttcgttggagggattaattgcctccatcagaaccctcttagtcaggagtttgaggcctatatcaatgcaagcggcgaacatggcatcgttgtcttctctctaggcagtatggtctccgagatacctgagaaaaaagctatggccatcgctgatgcactcggaaaaatcccacaaactgttttgtggcgctacaccggaacccgcccatcgaacttggctaataacacaattctggtgaaatggcttcctcagaacgatcttctcggacatccaatgactcgagccttcataacccatgccggaagtcatggggtgtatgagtctatttgcaatggggtaccaatggttatgatgcctctctttggtgaccaaatggacaacgctaagagaatggaaactaaaggagcgggtgttactcttaatgtgttggagatgaccagcgaagacttggaaaacgcattgaaggctgtaatcaatgataaatcatacaaagagaatattatgaggcttagtagtcttcataaggatagacccgtcgaaccgttggacctcgccgtattttgggtggaattcgtgatgaggcacaagggggctccccatttgcgtccagccgcccatgatcttacttggtatcaatatcatagtcttgatgtcataggctttttactggcagttgtgttgactgtggcttttatcacttttaaatgttgtgcgtacggatatcgtaagtgtctgggaaagaaaggcagagttaaaaaagcacataagagcaagacacac

SEQ ID NO: 20831 - DNA, 1599 bp, synthetic construct
  misc_feature 1..1599: note = source = /note="Description of Artificial Sequence: Synthetic coding sequence"
  source 1..1599: mol_type = other DNA
atggcggtcgaatcgcaaggaggacggcccctcgtgttgggactgctgctctgcgtgcttggaccagtggtgtcccacgcggggaagatcctcctgatccccgtcgatggatcccactggctctcaatgcttggagcgatccagcaactgcagcagcgcggacacgagatcgtggtccttgcccctgacgcctccttgtacatccgcgatggcgctttctacaccctgaaaacctacccggtgccgttccagcgcgaagatgtcaaggaatcatttgtgtcgctcggtcataacgtctttgagaatgattcattcctccagcgcgtgatcaaaacttacaagaaaattaagaaggacagcgccatgctcctgtcgggctgctcccatctgctgcacaacaaggagctcatggcctcgcttgccgagagcagctttgatgtgatgctgactgacccattcctgccgtgctccccgatcgtggcgcaatacctgtccctcccaactgtgttctttctccatgcactgccttgcagccttgaattcgaagctacccagtgccctaacccattctcgtacgttcctcggccgctcagctcgcactcggaccatatgactttcctgcagagggtgaagaacatgctgattgcattcagccagaatttcttgtgtgatgtcgtctactcgccctacgcaactctggcttccgaatttctgcagagagaggtgactgtacaagacttgctgtcgagcgcctcagtctggctgttcagaagtgacttcgtgaaagactacccgcggccgatcatgccaaacatggtgttcgtcgggggcatcaactgtctgcaccaaaacccgttgtcccaggagttcgaagcgtacatcaacgcatccggagaacatggcatcgtggtctttagcctcggctctatggtgtcagagattccagaaaagaaagcaatggccatcgccgacgccctgggaaagatccctcagacggtgctgtggcgctacactgggacccggccgtccaatctcgccaataataccatcctcgtgaaatggctgccgcagaatgacctgctgggacatccgatgacccgggctttcatcacccacgctggctcccacggagtctatgagtcgatttgcaacggcgtgccaatggttatgatgcctctgttcggagatcaaatggacaacgcaaagcggatggaaaccaagggagccggggtgaccctgaacgtcctggagatgactagcgaagatctggagaacgccttgaaggcggtgatcaacgataaatcatacaaggaaaatatcatgcgcctttcgtcactccataaagacaggccggttgaacccctcgacctggccgtgttctgggtcgagtttgtgatgcgtcacaagggggccccacacctcagaccggcggcgcacgacctgacgtggtaccaataccactctctcgacgtgatcggttttctgttggcagtggtcctgaccgtggcgttcattactttcaaatgctgcgcctatggttaccgaaagtgtcttggaaagaagggtagagtgaagaaggctcacaagtcaaagacgcat

SEQ ID NO: 20832 - DNA, 1599 bp, synthetic construct
  misc_feature 1..1599: note = source = /note="Description of Artificial Sequence: Synthetic coding sequence"
  source 1..1599: mol_type = other DNA
atggcggtcgaaagccagggaggacgccctctggtgctcgggttgctcctctgcgtgctgggaccggtggtcagtcatgcgggaaaaatcctgctgattccagtggacggatcgcactggctgtccatgctgggcgcaatccaacagttgcagcaaagaggacatgaaatcgtggtcctggcaccggatgcaagcctttacatccgggacggcgcgttttacaccctgaaaacctatcctgtgcccttccagcgcgaggacgtgaaggagagcttcgtgtcgctgggacacaatgtctttgagaacgactcgtttttgcagcgcgtgatcaagacctataagaagatcaagaaggactcggccatgctgctgtctggctgctcacatctcctgcacaacaaggaacttatggcgtccttggctgagtcgtcctttgacgtcatgctgactgacccgttcctgccgtgctcccctatcgtcgcccagtacctctcacttcctactgtgttctttctccacgcgctgccttgttcgctggaatttgaagcaacccaatgtccgaatcccttttcgtacgtgccgcggcccctgagctcgcactcagaccatatgaccttcctgcagagggtcaagaacatgctgatcgccttttcgcagaatttcctgtgtgatgtggtgtactcgccatacgccactctggcctcggagttcctccaacgggaggtgactgtgcaagatctgctgtcgtctgccagcgtgtggctgttccgcagcgatttcgtgaaggattacccgcgccctatcatgcctaatatggtgttcgtcggaggcatcaactgcctgcatcagaatcccctgagtcaagaattcgaagcctacatcaacgcctcaggggaacatggtattgtggtctttagcctcggcagcatggtatccgagatacccgagaagaaggcaatggcgatcgccgacgcactgggaaagatcccacaaaccgtgctttggagatacactggcacgaggccatcaaacttggcgaacaacactattctggtgaagtggcttccacaaaacgacttgctgggccacccgatgacccgggctttcattacccacgcaggaagccacggcgtgtacgaatcaatctgcaatggagtgccgatggtgatgatgcctctgttcggagatcagatggataacgcaaaacggatggaaaccaagggagcgggagtgactctgaacgtgctcgagatgacttcggaagatctggaaaatgccctgaaagccgtgatcaacgacaagtcctacaaggagaatatcatgcgcctctcatctctccataaagaccgccctgtcgaacctcttgacctcgcggtgttctgggtggaattcgtgatgagacacaagggagcaccacacctccggccagccgcgcacgatctgacttggtaccaataccattccctggacgtcattgggtttctgctcgcagtggtgctgactgtcgccttcatcacctttaagtgctgcgcctacggctatagaaagtgtctcggcaagaaggggcgcgtgaagaaagcccataagtctaagactcac

SEQ ID NO: 20833 - DNA, 1599 bp, synthetic construct
  misc_feature 1..1599: note = source = /note="Description of Artificial Sequence: Synthetic coding sequence"
  source 1..1599: mol_type = other DNA
atggcggtggaaagccagggaggtaggccactggtccttggtttgttgctgtgcgtactgggacctgtggtcagccacgcagggaagatcctcctgattcctgtcgatggctcacattggttgtcaatgctcggcgcaatccaacagcttcaacagcgaggtcacgaaatagttgtactggcaccagacgcgagcctgtacatccgggacggcgccttttatactttgaagacctatcccgttcccttccaacgggaggacgtgaaggagtcttttgtcagccttggccataacgtgttcgagaacgatagcttcctgcagagggtcataaaaacctacaagaagataaagaaagacagcgctatgctcttgagtgggtgctcccacctcctgcataacaaggaactgatggcatccctggcagaaagttcttttgatgtgatgctgactgacccgtttctgccctgttcccctatagtagcccagtaccttagcctgcctaccgtattttttctccatgccctcccttgctccctcgaatttgaagccacccagtgccctaatcccttcagttacgttccacgacctctgtcatctcatagtgaccatatgacgtttctccagagggtgaagaacatgctgattgccttcagtcaaaatttcttgtgtgacgtggtgtatagcccgtacgcaacccttgcctccgagttccttcagagagaggttaccgtgcaagacttgctgtcctcagcgtccgtgtggctcttccggtctgattttgtcaaggattacccacggcctatcatgccaaacatggtgtttgtaggaggcattaactgcctgcatcaaaaccctctgagccaggaattcgaagcatatattaatgctagtggagaacatggtatcgttgtgtttagcctggggtccatggttagtgaaatccccgaaaagaaggcaatggcaatagccgacgcactcggtaagattccacagaccgtcttgtggaggtacacaggtacaagaccatccaacttggccaacaataccatccttgtgaagtggctcccacagaatgacttgctgggacaccccatgaccagagcctttatcacccacgcagggtcacacggagtttatgagtctatttgcaacggcgtgcctatggtcatgatgcccctgtttggggatcaaatggacaatgccaaaaggatggagactaagggcgccggtgtgaccctcaacgtgttggagatgacgtccgaagatctggaaaacgcgcttaaggcggtgataaacgataagtcctacaaagagaatatcatgcggctgagtagtctccacaaggaccgaccagttgagcctcttgatttggccgttttttgggtggaattcgtcatgcggcacaagggtgcgcctcatcttcggcctgccgcacacgaccttacttggtatcagtatcattctctggacgtgatcggtttcctgcttgccgttgtcctgaccgttgctttcatcactttcaagtgttgcgcatatgggtaccgaaaatgcctcggtaagaaggggagagtgaaaaaggctcataaatcaaagacgcac

SEQ ID NO: 20834 - DNA, 1599 bp, synthetic construct
  misc_feature 1..1599: note = source = /note="Description of Artificial Sequence: Synthetic coding sequence"
  source 1..1599: mol_type = other DNA
atggccgtcgaatcgcagggaggccggccgctcgtcctcggactcctgctgtgtgtgctgggcccggtggtgtcccacgccggaaagatcctcctcatcccggtggacggttcacactggttgtcaatgctgggcgcgattcagcagcttcagcagcgcgggcacgaaatcgtggtgctcgcgccggacgcatccctctacatccgggatggagctttttacactctcaagacttacccggtcccgttccagagggaagatgtgaaggaatcatttgtgtccctcggccataacgtgttcgagaacgatagctttctgcagcgagtcatcaagacttacaagaagatcaaaaaggatagcgccatgctgctgtcgggttgctcccacctgttgcacaacaaagaacttatggcttcccttgccgaatcgtcgttcgatgtcatgctgactgatccttttctgccgtgcagcccgatcgtggcgcagtacttgtcgcttccgaccgtgtttttccttcacgcgctcccttgttcgctcgagttcgaagcgacccaatgccctaaccccttttcgtacgttccgcggccgctgtcgtcgcactcggatcacatgacgtttctccaacgcgtgaagaacatgctgatcgcgttctcacagaactttctctgcgatgtagtctactccccatacgcaaccttggcctcagaattcctccaaagagaggtcaccgtgcaagacctcctgtcaagcgcctcggtctggctgttccgcagcgacttcgttaaggattacccaagaccgattatgccaaatatggtgttcgtggggggtatcaattgcctgcaccagaatcctctttcccaagaatttgaggcatacataaacgcctctggagaacatggaatcgtggtgttctcactgggatccatggtgtccgagatccctgagaagaaggctatggcaatcgccgacgcactggggaagatcccccagactgtgctctggcgctacaccggaacccggccgtccaacctcgccaacaatacgatcctcgtgaagtggttgccccagaacgacctgctgggccacccgatgaccagggcgttcatcacgcacgctggatcacacggtgtgtacgaatccatctgcaacggggtcccgatggtcatgatgcctctgtttggcgaccagatggacaatgccaaacggatggagactaaaggcgccggcgtgaccctcaacgtgctggaaatgacttcggaagatctggagaatgcgctgaaagctgtgatcaatgataagtcctacaaggaaaacatcatgcggctgtcgtccctgcataaggatcgcccagtcgagccgctggacctggccgtgttctgggtggaatttgtgatgcggcataagggagcaccgcatctccgcccagcggctcacgacctcacctggtaccagtaccacagcttggatgtgattggattcctgcttgcggtggtcttgaccgttgcctttatcactttcaaatgctgtgcttacggttaccgaaaatgcctgggaaagaagggccgggtgaagaaagcgcataagtcaaagacgcac

SEQ ID NO: 20835 - DNA, 1599 bp, synthetic construct
  misc_feature 1..1599: note = source = /note="Description of Artificial Sequence: Synthetic coding sequence"
  source 1..1599: mol_type = other DNA
atggcagtggaatcccagggcggtcgcccgcttgtactgggtcttttgctgtgtgtgttaggacccgtggtctctcacgccggcaagatacttttgattccggtagacggctctcactggctgtcgatgctgggagcgattcagcaacttcagcagcggggccacgagatcgtggtgctggctcctgacgcgtcactgtacatccgggatggagcgttctacaccctgaaaacataccccgtgcctttccagcgtgaagatgtgaaggaatcgtttgtttctttgggccataatgtcttcgagaacgattcgttcttgcagagggttattaagacatataaaaagatcaagaaggatagtgccatgctgttatctggatgctcccacctgctacataataaggaactcatggcttcgctagcagagtctagctttgacgtgatgctcaccgatccgtttctcccctgtagcccaattgttgcccagtacctctcgctgcctaccgtattctttctccatgccttgccttgcagtctggagtttgaggccacgcagtgtcctaatcccttcagttacgttccccgcccgctgtccagtcattccgaccatatgacattcttgcaacgagtcaaaaacatgctgattgccttcagtcagaacttcttgtgcgatgtggtgtattcgccatatgccacgctggcaagtgagttcttacagcgagaagtaaccgtgcaagatctgcttagttccgcaagtgtttggctgttccgtagtgactttgtgaaggattacccacggccgattatgcctaacatggtgttcgtcggtggtatcaactgtttacatcaaaaccccctgtcccaggagtttgaggcctacataaacgcctccggcgagcacggaatcgtggtgttctctctcgggtcgatggtgtccgagattcccgaaaagaaggccatggcgattgccgacgccctggggaagatcccacagacggtgctgtggcggtacacgggcacacggccgtccaacttggccaataataccatcttagtgaagtggctaccccagaacgacttactaggacacccgatgacacgagccttcatcacgcacgccggtagccatggcgtttacgagtccatctgcaatggagttccaatggtaatgatgccgttattcggagatcaaatggacaacgccaagcggatggaaactaagggtgcaggcgtaacactaaatgtcttggagatgacgtctgaggatctggagaacgctctgaaggccgtgatcaacgataagtcctataaagagaatattatgaggttaagctcgctgcacaaagatcgtccggtcgaacccctagacttggcggtgttctgggtggagttcgtgatgaggcataagggtgctcctcacctacgccccgccgcccacgatctgacgtggtatcagtatcactccctggatgtgatcggattcctgctggccgtcgtgctgacggttgcgtttatcacttttaaatgttgtgcctatggctaccgaaagtgtctgggtaagaaaggccgcgtaaagaaggcccacaagagcaagacccat

SEQ ID NO: 20836 - DNA, 1599 bp, synthetic construct
  misc_feature 1..1599: note = source = /note="Description of Artificial Sequence: Synthetic coding sequence"
  source 1..1599: mol_type = other DNA
atggccgttgagtcccagggggggcgtcctttggtgctgggtctcctcctgtgtgttttgggccctgttgtctcccacgctggcaagatcctgctcatcccagttgacgggagtcactggctctctatgctgggagccattcagcagctgcagcagcgcggccacgaaattgttgtgttggctccagatgcctcactgtacatccgtgacggcgccttctatacactaaagacttatccagtcccttttcaaagggaagacgttaaagaatcattcgtgtccctaggacacaatgtgttcgagaatgacagtttcttgcaacgcgtgattaagacctacaagaaaatcaaaaaagactccgctatgctgctaagcggatgtagtcatttactccacaataaggaactaatggcaagcctggctgaaagcagtttcgacgttatgctgaccgacccttttttaccttgttcccccatcgtcgcccagtatctgtcactgccgaccgtgtttttcctgcatgctttaccgtgcagcctggagtttgaggcaacccagtgtccaaatcctttttcctatgtaccccggcccctatcctcccattctgatcacatgaccttcttacagagggtgaagaatatgctgatcgcctttagccagaattttctttgcgacgtggtgtattcaccctacgctaccctggcttcagagtttctccagagagaggtgactgttcaggacttactgagttccgcctccgtgtggttgttccggtcagactttgtcaaggactaccccagacccatcatgccaaatatggtgtttgtgggaggaattaactgccttcaccaaaatccactcagtcaggaattcgaggcctatataaacgcatccggcgaacatggcatcgtggtattttccttgggctccatggtgagcgagattcccgagaagaaggccatggcaatcgccgacgcccttggcaagatcccccagacggtgctgtggcgttatacagggacccgcccgtccaatctggcgaataatacaatccttgtgaagtggctgccacagaatgacctgctggggcaccctatgacccgagccttcatcacgcacgcaggatcccacggggtctacgaatcaatctgcaatggagtaccaatggtaatgatgcccctgtttggcgatcagatggataacgccaagaggatggagacaaagggagcaggagtcacgctcaacgttcttgagatgacaagtgaggacctggaaaatgccctgaaggccgtcataaatgacaagtcctataaggagaatatcatgagactgagtagcctccacaaggaccgtccggttgagccgcttgaccttgcagtcttctgggtggaattcgtcatgcggcataagggagccccacatctgaggcctgctgctcatgaccttacgtggtaccagtatcattcacttgatgtgattggctttctgttagcagttgtcctgacagtggccttcattaccttcaagtgttgcgcatacgggtatcggaagtgccttgggaagaagggccgggttaaaaaggcacataagtcaaaaacacac

SEQ ID NO: 20837 - DNA, 1599 bp, synthetic construct
  misc_feature 1..1599: note = source = /note="Description of Artificial Sequence: Synthetic coding sequence"
  source 1..1599: mol_type = other DNA
atggccgttgagtcacaaggcggtaggcctctggtgcttgggcttctactctgcgtcctcgggccagtggtgagtcacgccgggaaaatcttgcttataccggtagacggtagccactggctgtctatgttaggcgcgatccagcagctgcaacagcgggggcatgagatcgtggtgctggcgcccgacgcctccctatatataagggacggagcattctacacacttaaaacgtaccccgtcccatttcagagagaggacgtcaaggaatccttcgtaagcctgggtcacaacgtcttcgaaaatgacagctttcttcaacgtgttattaaaacatacaaaaagattaagaaggattctgccatgttgctgagcgggtgttcccacttgctgcacaataaagaattgatggcgagcctcgcagagtcctccttcgatgtgatgttgaccgacccttttttgccatgctcgcccattgtggcccagtatctttccctccccaccgttttttttctgcacgccctaccctgttccctggaattcgaggcaactcagtgccccaatccctttagttacgtgccacggcctctgtcaagccactccgaccacatgactttcctgcagcgggtgaagaacatgctgatcgcatttagtcaaaatttcttgtgtgacgtcgtttactcaccctatgccacgctcgcctccgaattcctccagagggaggtcacggtccaggatctcctgtcttcagcttccgtgtggttgtttcgttcagacttcgtcaaggattacccccgccctatcatgccaaatatggtgttcgtgggcgggattaactgtctgcaccagaatccgttaagccaggagtttgaggcttacattaatgcgagcggagaacacgggattgtcgtgttctcactgggttctatggtgtcagaaattccggagaagaaggctatggcaattgccgatgcactgggcaagattccccagactgtgttgtggcggtacacgggcactaggcccagcaatctggctaataataccatcctagttaagtggctgcctcagaacgacctgctgggccacccaatgaccagggcattcatcacccatgctgggtcccatggggtgtacgaaagtatatgtaacggggtgcctatggtgatgatgccactcttcggagatcagatggataacgctaaacgtatggaaacaaagggagccggggtgacactcaacgtgttggaaatgacctccgaggacctggaaaacgctctgaaagcagtgattaacgacaaaagctataaggaaaatatcatgagactgagcagtcttcataaagacagaccagtggagcccctagacctggcagttttttgggtggaattcgtaatgcgacacaaaggagcccctcatctaaggcccgcagcccacgatctcacttggtaccagtatcactcactggatgttattgggttcctcctggccgtggtgttgaccgtggctttcattacattcaaatgctgtgcctacggctacagaaaatgtctgggcaaaaagggacgggtgaaaaaagcacataaatctaaaactcat

SEQ ID NO: 20838 - DNA, 1599 bp, synthetic construct
  misc_feature 1..1599: note = source = /note="Description of Artificial Sequence: Synthetic coding sequence"
  source 1..1599: mol_type = other DNA
atggcagtggagagccaagggggacgcccacttgtcttgggcctcctgctgtgtgtgctgggcccggtggtaagccacgccggaaagatcctgcttatccctgtggacgggagtcactggctgagcatgttgggggctattcagcagcttcagcagcgcggtcacgagattgttgtattggctcctgatgctagcctgtacataagagacggtgccttttacacgttgaaaacttacccggtcccattccagcgcgaggacgtgaaggagagcttcgtctccttgggccataatgttttcgaaaatgattcttttctgcaaagggtcatcaagacgtataagaaaatcaagaaggacagcgctatgcttctatccggctgtagccatctgctgcataacaaggagcttatggcgagcttggctgagagcagcttcgacgtgatgcttaccgaccctttcctgccgtgcagcccgatcgtcgcgcaatacctgagcctcccaaccgtgttctttcttcatgcactcccgtgttccctcgaatttgaggcaacacagtgcccaaaccctttttcctacgttccgcgccctttgagctcccatagcgaccacatgactttcctgcagagagttaagaacatgctgatcgccttcagccagaactttctgtgcgacgtcgtgtactcaccatacgcaaccttggcgagcgaattcttgcagcgcgaggttactgtgcaagatctgttgagctccgcgagcgtgtggctttttcgctccgacttcgtaaaggactatccaagaccgattatgccgaacatggtcttcgtcggaggtattaactgtcttcaccagaaccctttgtcccaggaatttgaggcttacatcaatgcttccggcgagcacggtatagtcgtgtttagcctgggcagtatggtcagcgaaatccctgagaaaaaggctatggccattgcagatgcattgggtaagatcccgcagaccgtgctgtggcgatatactggcacccgtccgagcaacctggcaaataataccatactggtgaaatggcttccgcaaaatgatctccttggccacccaatgactcgtgcatttatcacgcacgccgggagccacggcgtctacgagtccatatgtaacggcgtccctatggtgatgatgccattatttggcgaccagatggacaacgccaaacggatggagacgaagggtgccggagtcacgctcaatgtcctggaaatgacttctgaggatctggagaacgcactgaaggccgtcattaatgataagtcctataaggagaacataatgcgcctgagtagccttcacaaagaccgccctgtggagccgctcgatctggccgtcttttgggtggagtttgtgatgcgtcacaagggagcaccacatttgcggccagcggctcatgacttgacgtggtatcagtaccattcattggatgttatcggttttcttctggcagtcgtcctgaccgtggcttttatcactttcaagtgctgcgcctatggatatcgtaaatgtctgggcaagaagggtcgtgttaagaaagcgcacaagtccaagacccat

SEQ ID NO: 20839 - DNA, 1599 bp, synthetic construct
  misc_feature 1..1599: note = source = /note="Description of Artificial Sequence: Synthetic coding sequence"
  source 1..1599: mol_type = other DNA
atggcagtcgaatcgcagggaggtcggccgctggtcctgggcctccttctctgtgtcctcggaccggtggtgtcgcatgcgggcaaaattctgttgatcccggtcgatggctcgcattggctctccatgcttggagcaatccagcaactgcaacagcgcggccatgagatcgtggtgctcgctcccgatgcctcgctttacatccgcgacggtgcgttttacaccctgaaaacctaccctgtcccgttccagcgcgaagatgtaaaggagtcgttcgtgtcgctcgggcacaatgtgttcgagaacgactcattcctgcaaagagtgattaagacctacaagaaaatcaaaaaagactccgcaatgctgctgtcgggatgctcccatctgctccataacaaggaactcatggcctcactcgccgaatccagcttcgacgtgatgctgacggatccattcctgccttgttcaccgatcgtggcgcagtacttgtcgctgccgacggtcttttttctgcacgctctgccctgtagtcttgagttcgaagcaactcagtgcccaaatccgttttcttacgtgccgcggcctctgtcctcacacagcgaccatatgacgttcctgcaacgggtgaagaacatgttgatcgctttttcgcagaacttcctgtgcgacgtggtctattcgccatacgcaaccctggcatcggaattccttcaacgcgaagtgactgtccaggacctgctgtcctcggcatccgtgtggctgttccgctccgacttcgtgaaggactatccgcgaccgatcatgccaaacatggtgttcgtaggaggcattaactgcttgcaccaaaatcctctttcccaagagttcgaggcgtacatcaacgccagcggagaacacggcatcgtggtcttttcccttggcagcatggtttcggaaattccggagaagaaggcgatggcgatcgctgatgcactcgggaagatcccacagaccgttctgtggcggtacactggaaccaggccctcaaacttggcgaataacaccatcctggttaagtggcttccacagaacgatctgctggggcatccaatgaccagggcattcatcacccacgcgggatcacacggcgtgtacgagtcgatatgtaatggtgtgccgatggtgatgatgccactgttcggggatcaaatggacaatgctaagagaatggagacgaagggcgccggcgtcaccctgaacgtcctggagatgaccagcgaagatctggaaaacgccttgaaagcagtgatcaacgataagtcctacaaggagaacatcatgagactgtcctcgttgcacaaggaccgccccgtggaaccgctggatttggcagtgttctgggtggaatttgtgatgcgccacaagggcgcccctcaccttcggccggcggcgcatgatcttacgtggtaccagtaccattcactggacgtcatcggattccttctggcggtcgtgctgaccgtcgcgttcatcaccttcaagtgctgcgcctacgggtatcggaagtgtctcggaaaaaagggaagagtgaaaaaggcccataagtcaaagacccat

SEQ ID NO: 20840 - DNA, 1599 bp, synthetic construct
  misc_feature 1..1599: note = source = /note="Description of Artificial Sequence: Synthetic coding sequence"
  source 1..1599: mol_type = other DNA
atggccgtagagtcacaaggagggaggcctttggtgctaggtcttttgttatgcgtcttagggccggtggtgtctcatgcaggaaaaattcttctcattccggttgacggcagccattggctttcaatgttaggcgctatccaacaacttcaacaaaggggccatgaaattgtcgtcttagcaccggatgcaagtctctacattcgcgatggagcgttttatactttgaaaacatacccagtgccgtttcaaagagaggacgttaaagaatcctttgtctcattagggcataatgttttcgaaaacgatagctttcttcaaagggtaatcaaaacgtataagaaaatcaagaaagactcagcgatgctgctctctggatgtagccatttactgcataacaaagaactgatggcaagtttagcagaatcctcgtttgatgtcatgctgacagaccctttcctcccttgctcccctattgtcgcacagtatctcagccttccgacagtgttctttttgcatgctctcccttgctccctggaatttgaagctacgcagtgccctaatcccttcagctatgtgccgcgtccactgtcaagtcacagcgatcacatgactttcttgcagcgcgtcaaaaacatgctgattgctttctctcaaaattttttatgcgatgtcgtatattcaccctacgcgacgcttgcatctgaattccttcagcgcgaggtgaccgtccaggatttgctttcctccgcgtcagtctggttatttagaagtgatttcgttaaagattatccgcggccgattatgcccaatatggtctttgtgggcggaattaattgtttacatcaaaacccattaagccaggaatttgaagcgtatattaacgcctcgggcgaacatggtatagtagttttttcactgggatccatggtgagcgaaattccggagaaaaaggctatggccattgccgatgctttaggaaaaatcccgcagacagtattatggcgctacacgggaacgcgaccgtctaatttagcaaacaatacaatcttggtcaaatggttacctcagaatgaccttttgggacatccaatgactcgtgcctttattacccacgccgggtcccatggcgtttatgagtctatttgcaatggagtgccgatggtaatgatgccgttgtttggggaccaaatggataacgcaaagcgtatggaaacgaaaggcgcaggggtcacattaaatgtccttgaaatgacaagcgaggatcttgaaaatgcccttaaagcagttattaacgacaaatcctataaagaaaatattatgagactttcttcattgcataaggaccggcctgtcgaaccactcgatctcgctgtgttttgggtcgaatttgtaatgcgccataaaggtgcgccgcatctcagaccggctgcacatgatcttacttggtaccagtatcactctctcgatgttattggctttttattagctgtggtacttacagttgcttttatcacgttcaaatgctgcgcgtatgggtatagaaaatgcttaggcaaaaaaggacgagtcaagaaagcccataagtccaagacgcat

SEQ ID NO: 20841 - DNA, 1599 bp, synthetic construct; identical to SEQ ID NO: 20777
  misc_feature 1..1599: note = source = /note="Description of Artificial Sequence: Synthetic coding sequence"
  source 1..1599: mol_type = other DNA

SEQ ID NO: 20842 - DNA, 1599 bp, synthetic construct
  misc_feature 1..1599: note = source = /note="Description of Artificial Sequence: Synthetic coding sequence"
  source 1..1599: mol_type = other DNA
atggcggtagaatctcagggaggccgccccctggttctcggactcttgttgtgtgtactcggtccggttgtgtcccatgccggaaagatattgcttattcccgtggacggctcccattggttgagcatgttgggagccatacaacaattgcagcagcgcggccacgagatcgtggtcttggcacccgacgcctcactctacataagagacggtgccttctatacactgaagacctaccccgttccgttccagagggaggacgtcaaagagtcttttgtgtcactgggacacaatgtattcgagaatgattcctttcttcagcgcgtaatcaagacatataaaaagattaagaaggacagcgctatgctgttgtccggatgctcccatcttctgcacaataaggagctgatggcgtctctcgctgagagctctttcgacgtgatgctgactgaccctttcttgccgtgctctcccatcgtggctcaatacctcagtctccccaccgtcttcttcctgcacgccctgccatgctctctggagttcgaggccacacagtgccccaaccctttctcctacgtgccgcgccctctctcctctcattcagaccatatgacattcctgcaaagagtgaagaatatgctcatcgctttcagccaaaacttcttgtgcgacgtcgtgtattccccttacgctactttggcgtcagagtttctgcaaagggaagtaacagtgcaggatcttttgtcctctgcgagtgtatggctgttcaggtccgattttgtgaaggactatccacgcccgattatgcccaatatggtattcgtcggcggaataaactgtctccaccaaaacccactcagccaagaatttgaggcctacatcaacgcttccggagagcacggaattgtggtcttctccttgggaagcatggtctccgaaattccagaaaaaaaagcaatggcaatagccgatgcgcttggtaagatcccacagacagttctttggcgctatacaggcacccgccccagcaacttggccaacaatacgatcctcgtcaagtggttgccccagaacgaccttttgggacatcctatgaccagagcctttatcactcatgctggtagccacggagtatatgagtccatctgcaatggtgtcccaatggtcatgatgccgctcttcggtgatcaaatggataatgcgaaacgcatggaaacaaagggagccggcgttacactcaacgtcctggaaatgacttctgaggatcttgaaaacgccctgaaggccgtgatcaacgataagagttacaaagaaaacataatgagattgagttccttgcacaaagataggcccgtcgagccactggatctcgccgtcttctgggttgaattcgtgatgcgccacaaaggagcccctcatctccgccctgccgcacacgacctgacatggtaccaatatcactcacttgacgtgatcggtttcctgcttgccgtggtcctcaccgtggccttcattacgtttaagtgctgtgcttacggctataggaagtgtttgggaaagaaaggtagggtcaagaaagcacacaagagtaagacccat

SEQ ID NO: 20843 - DNA, 1599 bp, synthetic construct
  misc_feature 1..1599: note = source = /note="Description of Artificial Sequence: Synthetic coding sequence"
  source 1..1599: mol_type = other DNA
atggcagtggaatctcagggtggaaggccgctggtccttggcctcctgttgtgtgtgctgggccccgtggtgtcccacgcagggaaaatcctcctgatccccgtagacggaagccactggctgtccatgctgggagctatccagcaattgcagcagagaggccatgagatcgtcgtcttggcacctgatgcgagtttgtacatccgcgatggggccttctatacactgaagacatatccagtaccctttcagcgagaggacgtcaaggagagctttgtgagtctagggcacaatgtgtttgaaaacgattccttcctccagcgagtgataaagacgtataagaaaatcaaaaaggactctgccatgctactctctgggtgctcccacctcttacacaataaggaactaatggcttccttagctgagagcagcttcgacgttatgctcacggatccttttttgccgtgttcccccatcgtggcccagtatttgagtctgcctactgtgtttttcctccatgctcttccttgctccctggaatttgaggcaacccagtgccctaaccccttttcatatgtgcctagaccactatcatctcacagcgatcatatgacctttctgcagagggtcaagaatatgcttatcgccttttctcagaacttcctctgcgatgtggtgtattccccatacgcaaccctggcctcagaattcttacagcgggaagtgactgtccaggatctgttgagctccgcctccgtctggctcttccgttctgattttgtcaaagactatccacggccgattatgcccaacatggtgttcgtaggcggtatcaactgccttcaccagaatccactgtcacaggagttcgaggcctacatcaatgcgagcggcgaacacggtatcgtcgtattttctttgggatctatggtctctgaaataccagaaaagaaggccatggctattgctgatgcccttggaaagattccgcagacggtgctatggcgatacactggtacgcgcccttcaaacctcgctaacaatactatcctcgttaaatggctaccgcaaaacgacttgctcggtcaccctatgaccagagctttcattacgcacgcaggaagtcacggcgtttatgagtctatctgtaacggggtacccatggtcatgatgcctctttttggtgaccagatggacaatgcaaagagaatggagaccaagggggcaggcgtgacgctaaatgttctggagatgaccagcgaagacctggaaaacgcactgaaagctgttatcaacgataaaagttacaaagagaatatcatgcgcttgagcagtctgcacaaggatcgacccgtggaaccgcttgatctcgctgtattctgggtggagtttgtcatgaggcataaaggagcccctcacctgcgaccagcagcacacgatctgacttggtatcagtatcactctttagatgtgatcggttttctgctggccgtagtgctgaccgtcgcttttataaccttcaagtgttgcgcatacggatatcgaaaatgtttgggtaaaaagggacgggtgaagaaggctcataaatctaagacgcac

SEQ ID NO: 20844 - DNA, 1599 bp, synthetic construct
  misc_feature 1..1599: note = source = /note="Description of Artificial Sequence: Synthetic coding sequence"
  source 1..1599: mol_type = other DNA
atggccgtggagtcacagggaggacggccgctcgtgctgggcctgctgctctgtgtgctggggccagtagtctcccacgctggaaaaatcctgcttatcccggtggacggcagccactggctgtcgatgctgggcgcgattcagcaactgcaacaacgtgggcacgagatcgtggtactcgccccagatgcctcactctacatccgcgatggtgccttttacacgctgaaaacttacccggtgcccttccagcgggaagatgtcaaagaatcgttcgtgtccctgggacacaacgtttttgaaaatgactcattccttcagcgggttatcaagacctataagaagataaagaaggactcggcaatgctcctgtctggatgctcgcacctgcttcacaacaaggaactcatggcctcgctggcagaaagcagctttgacgtgatgctgactgacccgttcctcccgtgctcgccgatcgtggcccagtacctctcgcttccgactgtgttcttcttgcatgccctcccttgctcactggagttcgaggccacccaatgcccgaaccccttctcctacgttccccgccccctttcctcgcattcggatcatatgaccttcctgcaacgtgtgaagaatatgctgattgcgttttcccagaatttcctgtgcgacgtggtctacagtccgtacgcgaccttggcgtccgaatttctgcagcgcgaggtgacggtgcaagatcttttgagctcagcttcagtctggttgttcaggtctgactttgtgaaggactacccgaggccgatcatgccaaacatggtgtttgtcgggggcatcaattgtctccaccaaaacccgctgtcccaggaattcgaggcttacatcaacgcctcgggcgagcatggaatcgtggtcttttcattggggagcatggtttccgaaatccccgaaaagaaagcgatggcgatcgctgacgcgctgggaaagattcctcagaccgtgctttggcgctacactgggactagaccttcgaatctggctaacaacacgattcttgtgaagtggctgcctcagaacgatctgctgggccatccaatgaccagagctttcatcacccatgcgggttcacatggagtgtacgaatcgatctgcaacggggtcccaatggtcatgatgccattgttcggcgaccagatggataacgcaaaacggatggagactaaaggagcaggagtgaccttgaacgtcctggaaatgactagcgaagatttggagaatgccctgaaagcagtcatcaatgataagagctacaaggagaatatcatgcgcctctcatccctgcacaaggaccgtcctgtcgagcccctggatctcgcagtgttctgggtcgaattcgtgatgcggcacaaaggcgccccacacctgcggcctgccgcacacgacctgacttggtaccagtaccactcactcgacgtaatcggattcctgctcgccgtcgtgttgaccgtggccttcatcaccttcaaatgttgcgcttatggatacagaaaatgcttgggaaaaaagggtcgagtgaagaaggcacataagagcaagacccac

SEQ ID NO: 20845 - DNA, 1599 bp, synthetic construct
  misc_feature 1..1599: note = source = /note="Description of Artificial Sequence: Synthetic coding sequence"
  source 1..1599: mol_type = other DNA
atggcggtagaatcgcaaggtggtcgtccgctagttctaggtctattattatgtgtattaggtccggtagtatcgcatgcgggtaaaatattactaataccggtagatggttcgcattggctatcgatgctaggtgcgatacaacaattacaacaacgtggtcatgaaatagtagtattagcgccggatgcgtcgttatatatacgagatggtgcgttttatacgctaaaaacgtatccggttccgtttcaacgtgaagatgtaaaagaatcgtttgtttcgctaggtcataatgtatttgaaaatgattcgtttttacaacgtgtaataaaaacgtataaaaaaataaaaaaagattcggcgatgttattatcgggttgttcgcatttactacataataaagaactaatggcgtcgttagcggaatcgtcgtttgatgtaatgttaacggatccgtttttaccgtgttcgccgatagttgcgcaatatctatcgttaccgacggtattttttctacatgcgttaccgtgttcgctagaatttgaagcgacgcaatgtccgaatccgttttcgtatgtaccgcgtccgttatcgtcgcattcggatcatatgacgtttttacaacgtgtaaaaaatatgctaatagcgttttcgcaaaattttctatgtgatgtagtttattcgccgtatgcgacgttagcgtcggaatttttacaacgagaagtaacggtacaagatctactatcgtcggcgtcggtatggttatttcgatcggattttgtaaaagattatccgcgtccgataatgccgaatatggtttttgtaggtggtataaattgtttacatcaaaatccgttatcgcaagaatttgaagcgtatataaatgcgtcgggtgaacatggtatagtagtattttcgctaggttcgatggtttcggaaataccggaaaaaaaagcgatggcgatagcggatgcgttaggtaaaataccgcaaacggttttatggcgatatacgggtacgcgtccgtcgaatttagcgaataatacgatattagtaaaatggttaccgcaaaatgatctactaggtcatccgatgacgcgtgcgtttataacgcatgcgggttcgcatggtgtttatgaatcgatatgtaatggtgttccgatggtaatgatgccgctatttggtgatcaaatggataatgcgaaacgtatggaaacgaaaggtgcgggtgtaacgttaaatgtattagaaatgacgtcggaagatttagaaaatgcgctaaaagcggttataaatgataaatcgtataaagaaaatataatgcgtttatcgtcgttacataaagatcgtccggtagaaccgttagatttagcggttttttgggtagaatttgttatgcgacataaaggtgcgccgcatctacgtccggcggcgcatgatctaacgtggtatcaatatcattcgttagatgtaataggttttttattagcggttgttctaacggtagcgtttataacgtttaaatgttgtgcgtatggttatcgaaaatgtttaggtaaaaaaggtcgtgtaaaaaaagcgcataaatcgaaaacgcat

SEQ ID NO: 20846 - DNA, 573 bp, synthetic construct
  misc_feature 1..573: note = source = /note="Description of Artificial Sequence: Synthetic coding sequence"
  source 1..573: mol_type = other DNA
atgaatttcctgttgtcttgggttcattggagtctggctttacttctatatctgcatcacgccaagtggagccaggccgctccgatggccgagggcggagggcagaaccatcatgaggtagtgaaattcatggacgtgtatcaaaggtcttactgtcatccaatcgagactctggtggacatatttcaggagtacccagacgagatcgaatatattttcaagccaagctgcgttccactaatgagatgcgggggctgctgtaacgatgaaggactggagtgtgtgccgacggaggaaagtaacatcacaatgcagattatgaggatcaagccacaccagggccagcacatcggagagatgagctttctccagcataacaaatgtgaatgtagaccaaaaaaggaccgtgcccgccaggagaatccatgcgggccgtgttccgagcggcggaagcatctattcgtccaggacccacagacgtgcaaatgcagttgcaaaaacaccgactctcgttgtaaggccagacagttggagcttaacgagagaacttgtagatgcgataagccgcgcaga

SEQ ID NO: 20847 - DNA, 573 bp, synthetic construct
  misc_feature 1..573: note = source = /note="Description of Artificial Sequence: Synthetic coding sequence"
  source 1..573: mol_type = other DNA
atgaacttccttctgtcctgggtccattggagcctcgctctcctgctgtacctccaccacgcaaagtggtcccaagccgcgcccatggcagaagggggaggacagaaccatcacgaggtcgtgaaattcatggatgtgtaccagcggtcctattgccaccccatcgagaccctggtggacatcttccaggagtaccctgatgaaatagagtacatcttcaaaccttcctgcgttcctctgatgagatgtggtggctgttgtaatgacgagggactcgagtgtgtgcccacggaagagtccaacatcactatgcagatcatgcgcatcaaaccccaccaagggcaacacatcggggagatgtcattcctccaacacaataagtgcgagtgccgcccaaagaaggatagggcgagacaagagaatccttgtggaccctgcagtgaaagaagaaaacacctcttcgtccaagacccgcagacctgcaagtgctcatgcaaaaataccgactcccggtgtaaggctcggcagctggagcttaacgaacgaacctgtcgttgcgacaaaccgcggcga

SEQ ID NO: 20848 - DNA, 573 bp, synthetic construct
  misc_feature 1..573: note = source = /note="Description of Artificial Sequence: Synthetic coding sequence"
  source 1..573: mol_type = other DNA
atgaactttcttttgtcttgggtccattggtcgttggctctgttgctctatctccaccacgccaagtggagccaggctgctcctatggccgagggtggaggacaaaatcatcacgaggtcgtcaagttcatggatgtctaccagaggtcctattgccaccccatcgagaccctggtcgatatttttcaggagtatccggatgagatcgagtacattttcaaaccttcttgcgtcccccttatgcgttgtggcgggtgttgcaatgacgaggggctcgaatgcgtccctaccgaagagtctaacatcaccatgcaaatcatgcgtatcaaaccccaccagggtcagcacatcggtgaaatgtcctttctccagcataacaaatgcgaatgccgaccaaaaaaagaccgtgctcgtcaggagaacccatgcgggccttgctccgagcgtcggaagcatttgttcgtccaggacccacagacctgtaagtgctcttgtaagaataccgattcccgctgcaaagccagacagctggaattgaatgagcgcacctgccgctgtgataagcctcgtcgc

SEQ ID NO: 20849 - DNA, 573 bp, synthetic construct
  misc_feature 1..573: note = source = /note="Description of Artificial Sequence: Synthetic coding sequence"
  source 1..573: mol_type = other DNA
atgaactttctcctgtcttgggtgcactggagcctcgccctactgctgtacttgcaccatgcaaaatggagccaagctgctccaatggccgaaggagggggccagaaccaccatgaagttgtaaaattcatggacgtgtaccagcgctcctactgtcacccaatcgagacactggtggatatcttccaggaataccccgacgagatcgaatatatctttaagccttcctgtgtgcccttgatgagatgcggcgggtgttgcaacgatgagggcttagagtgcgttccaaccgaggagagcaacataaccatgcagataatgcgaataaagccccaccagggccagcatatcggggaaatgagcttcctgcaacacaacaagtgtgagtgtcgcccaaagaaagacagagcacggcaagaaaatccttgcggcccctgctctgaacgtagaaagcacctgttcgtgcaggatccacaaacctgtaagtgcagctgtaagaacaccgattcccgatgtaaggcccgccagctggaactgaatgagcggacctgtcgatgcgacaaacctagacgt

SEQ ID NO: 20850 - DNA, 573 bp, synthetic construct
  misc_feature 1..573: note = source = /note="Description of Artificial Sequence: Synthetic coding sequence"
  source 1..573: mol_type = other DNA
atgaatttcctgctttcttgggttcactggtcacttgcattgcttttatatctccatcatgcaaagtggtcccaagctgcaccaatggccgaaggaggggggcaaaatcaccacgaagtcgttaaattcatggacgtctatcaaagatcttattgtcacccaattgagactttggttgatatatttcaggagtatccagatgaaatcgagtacatcttcaagccttcgtgcgtaccgcttatgagatgtggaggatgctgcaatgatgaaggattggaatgcgtcccgactgaagaatccaatattactatgcaaataatgcgaatcaaaccacatcagggccagcacattggcgagatgagtttcttgcaacataataagtgcgaatgtagacctaaaaaagaccgcgcacggcaagaaaatccatgtggtccatgtagcgagcgacgaaagcacctctttgtgcaagatccacaaacttgtaaatgctcatgcaaaaataccgatagccgatgtaaagctcgacagttggaacttaacgaacgaacatgtagatgtgacaagccacgacgg

SEQ ID NO: 20851 - DNA, 573 bp, synthetic construct
  misc_feature 1..573: note = source = /note="Description of Artificial Sequence: Synthetic coding sequence"
  source 1..573: mol_type = other DNA
atgaacttcctgctctcatgggtccattggagcctggctcttcttctctacctgcatcacgccaaatggtcgcaggctgcgccaatggcagagggaggcggacagaaccaccatgaggtggtgaagtttatggacgtgtaccagcggagctactgccacccgatcgaaaccctcgtggacatcttccaggagtacccggacgaaatcgaatacattttcaagccatcgtgtgtgccgctgatgcgctgtggaggatgctgcaatgatgaaggtttggaatgtgtcccgactgaggaatcgaacatcactatgcagatcatgagaatcaaaccccaccaaggacaacacatcggtgagatgtcgtttctgcaacacaacaaatgcgaatgcagaccaaagaaggaccgggctagacaagaaaacccgtgtggaccatgctcagagaggaggaagcatctctttgtgcaggatccgcagacttgtaagtgttcgtgtaagaacaccgactcccgctgcaaagccagacagctcgaactgaacgagagaacttgtcgctgcgataaacccagacgg

SEQ ID NO: 20852 - DNA, 573 bp, synthetic construct
  misc_feature 1..573: note = source = /note="Description of Artificial Sequence: Synthetic coding sequence"
  source 1..573: mol_type = other DNA
atgaattttttattatcgtgggttcattggtcgttagcgttactattatatctacatcatgcgaaatggtcgcaagcggcgccgatggcggaaggtggtggtcaaaatcatcatgaagtagtaaaatttatggatgtatatcaacgttcgtattgtcatccgatagaaacgttagttgatatatttcaagaatatccggatgaaatagaatatatatttaaaccgtcgtgtgtaccgctaatgcgttgtggtggttgttgtaatgatgaaggtctagaatgtgttccgacggaagaatcgaatataacgatgcaaataatgcgaataaaaccgcatcaaggtcaacatataggtgaaatgtcgtttctacaacataataaatgtgaatgtcgtccgaaaaaagatcgtgcgcgtcaagaaaatccgtgtggtccgtgttcggaacgacgtaaacatttatttgtacaagatccgcaaacgtgtaaatgttcgtgtaaaaatacggattcgcgatgtaaagcgcgacaattagaattaaatgaacgtacgtgtcgatgtgataaaccgcgacga

SEQ ID NO: 20853 - DNA, 573 bp, synthetic construct
  misc_feature 1..573: note = source = /note="Description of Artificial Sequence: Synthetic coding sequence"
  source 1..573: mol_type = other DNA
atgaacttcctgctctcgtgggtgcattggtcactggcactcttgctctacctgcatcacgctaagtggtcgcaggccgcccccatggccgaaggcggaggacagaatcatcacgaggtcgtcaagttcatggacgtgtaccagcggtcctactgtcaccctattgaaacccttgtcgatatcttccaggagtaccctgatgaaatcgagtacattttcaagccatcgtgcgtgccgttgatgcggtgcggtggatgctgcaatgacgagggactcgagtgcgtcccaactgaagaaagcaacatcaccatgcaaatcatgcggatcaagccacaccagggccaacacatcggtgaaatgtccttcctccaacacaataagtgcgaatgtagaccgaaaaaggaccgcgcacgtcaagagaacccttgcggtccgtgcagcgaaagacgaaagcatctgttcgtccaagacccgcagacctgtaagtgctcctgcaagaacactgactcaagatgcaaggcccggcagctcgaactgaacgaacgcacttgcaggtgtgataagcctagacgg

SEQ ID NO: 20854 - DNA, 573 bp, synthetic construct
  misc_feature 1..573: note = source = /note="Description of Artificial Sequence: Synthetic coding sequence"
  source 1..573: mol_type = other DNA
atgaacttcctgctgtcctgggtgcattggtcactggccttgttgctttacctccaccatgccaaatggtcccaggcggccccaatggcggagggaggaggtcaaaaccatcatgaagtcgtgaagtttatggacgtttaccagcggtcctactgtcaccctatcgaaactctcgtggacatctttcaggagtacccggacgaaatcgagtatatctttaaaccgtcgtgcgtgccgctgatgcggtgcggaggatgctgcaacgatgaaggcctggagtgcgtcccgaccgaggaatcaaacatcacgatgcagatcatgcgcattaaaccgcaccagggacagcacatcggcgaaatgtcatttctgcaacataacaaatgtgaatgccggccgaagaaggaccgcgcccggcaggaaaatccgtgtgggccctgttcggagcgccgcaaacatcttttcgtgcaagatccgcagacctgcaagtgttcatgcaagaacactgattcaagatgtaaggcacgccagctggaacttaacgaacgcacctgccgctgcgacaagccgaggaga

SEQ ID NO: 20855 - DNA, 573 bp, synthetic construct
  misc_feature 1..573: note = source = /note="Description of Artificial Sequence: Synthetic coding sequence"
  source 1..573: mol_type = other DNA
atgaatttccttctgagctgggtacactggtcactcgcacttctgctctatctgcaccacgccaaatggtcacaagccgcaccaatggccgagggcggtggtcaaaatcatcacgaggtggtgaagtttatggatgtgtaccagagaagctattgtcacccaattgaaactttggtggatatctttcaagagtaccccgacgaaatagagtacatcttcaaaccatcctgcgtgccacttatgcgctgcggcggttgttgcaacgacgagggtctggagtgcgtccccactgaagaatcaaacatcacaatgcagattatgcgtatcaaaccacaccagggtcaacacatcggcgagatgagctttcttcagcacaataagtgtgagtgcaggcctaagaaagaccgcgcccgccaggagaatccctgcggtccttgtagtgagaggcgcaagcatctgtttgttcaggacccccaaacttgtaagtgttcctgtaaaaacacagattctcgttgcaaggctcgccagctggagcttaacgaacgtacctgccgttgcgacaagccaaggcgc

SEQ ID NO: 20856 - DNA, 573 bp, synthetic construct
  misc_feature 1..573: note = source = /note="Description of Artificial Sequence: Synthetic coding sequence"
  source 1..573: mol_type = other DNA
atgaacttcctcttgtcgtgggtgcactggtcactggccctgctcctctatctgcatcacgccaagtggagccaagctgcgccgatggccgaaggaggaggacaaaatcaccatgaggtcgtgaagttcatggacgtgtaccagcgctcatactgtcacccgattgaaaccctcgtggacattttccaggaatacccagacgaaatcgaatacatcttcaagcctagttgcgtgccgttgatgcgctgtgggggctgctgtaacgacgagggactggaatgcgtgcctaccgaagagagcaatatcactatgcaaatcatgagaatcaagccccaccagggccaacatattggagaaatgtctttcctgcaacacaacaaatgcgaatgcagaccaaagaaagatcgcgctagacaagaaaatccatgcggcccttgctccgagagaaggaaacatcttttcgtccaggacccgcaaacctgcaagtgttcgtgtaagaacactgactcaagatgcaaggcaagacagctcgaactgaacgagagaacctgccggtgcgacaagccgcgccgc

SEQ ID NO: 20857 - DNA, 573 bp, synthetic construct
  misc_feature 1..573: note = source = /note="Description of Artificial Sequence: Synthetic coding sequence"
  source 1..573: mol_type = other DNA
atgaactttctgctttcttgggtgcattggtcgctggccctgttgctctacctgcatcacgccaaatggtcccaggccgcaccaatggcggagggaggaggccagaaccatcatgaggtggtcaagttcatggacgtgtaccaaaggagctactgccaccctatcgaaacgctcgtcgatatcttccaagaatatccggacgaaatcgaatacattttcaaaccgtcatgcgtgccgctgatgcggtgcggtggatgctgcaatgacgaggggttggagtgcgtgcctactgaagaatccaacatcaccatgcagattatgcgcattaagccacaccaaggacaacacatcggagagatgtcgttcctccagcacaacaaatgcgagtgccgaccgaagaaggacagagctcggcaagaaaatccctgtggcccgtgctccgaacggcgcaagcacttgttcgtgcaggatcctcagacttgcaaatgctcatgcaagaatacggatagccgttgtaaagcacggcaactggaattgaacgagcgcacctgtcgttgtgacaagcccagacgc

SEQ ID NO: 20858 - DNA, 573 bp, synthetic construct
  misc_feature 1..573: note = source = /note="Description of Artificial Sequence: Synthetic coding sequence"
  source 1..573: mol_type = other DNA
atgaatttcctgctcagttgggtgcactggagcctagccttgttgctgtatttgcaccacgccaaatggtctcaggcggcacccatggctgaagggggtggacagaatcaccatgaagtggtgaaattcatggacgtgtaccaacgatcttattgccacccgattgagacactggtagatattttccaggagtaccccgatgagattgagtacatcttcaaaccttcctgtgtacctctgatgcgctgtggggggtgctgtaatgacgagggactcgagtgtgtaccaacagaggagagcaatatcaccatgcagatcatgcggataaagcctcatcagggccagcatatcggcgaaatgagtttccttcaacacaataagtgtgagtgccgaccgaaaaaggatcgcgcccgccaggaaaatccgtgcggtccttgtagtgaacggcgcaaacatctcttcgtgcaggatccccagacatgcaaatgcagctgcaagaatacggactctcggtgtaaggcccgccagctggagctgaacgagaggacatgcagatgtgacaaacctagacga

SEQ ID NO: 20859 - DNA, 573 bp, synthetic construct
  misc_feature 1..573: note = source = /note="Description of Artificial Sequence: Synthetic coding sequence"
  source 1..573: mol_type = other DNA
atgaattttctcctgtcatgggtccattggtcgctggcacttcttctgtaccttcaccatgcgaaatggtcgcaagcagcgcctatggccgaaggcgggggtcaaaaccatcatgaagtggtcaagtttatggatgtgtaccagaggagctactgtcaccctattgagactcttgtcgacatttttcaggaatatccagatgaaatcgaatacatctttaagccgtcgtgtgttcccctcatgcgctgcggtgggtgctgtaacgatgaaggtctggaatgcgtgcctactgaagaaagcaatatcacgatgcagattatgagaattaagcctcatcaaggacaacatattggagaaatgtcgtttctgcagcataacaagtgcgaatgcaggccaaagaaagatagggcacgtcaggagaacccttgcggaccttgtagcgagagacgaaaacatctctttgttcaagaccctcaaacttgcaagtgtagctgcaagaacacggattctcgatgtaaggcacggcagttggaactgaacgaaagaacctgtcgatgtgacaaacccagacga

SEQ ID NO: 20860 - DNA, 573 bp, synthetic construct
  misc_feature 1..573: note = source = /note="Description of Artificial Sequence: Synthetic coding sequence"
  source 1..573: mol_type = other DNA
atgaacttcctcctgtcctgggtccattggtcactcgcactgctcctttacctgcatcacgccaaatggtcgcaggcagcccctatggctgaaggcggaggccagaatcatcatgaagttgtcaaattcatggatgtgtaccaacgctcgtactgtcacccgatcgaaaccctggtggacatcttccaggaatatcctgacgagatcgaatacatctttaagccgagctgcgtgcccctcatgaggtgcggaggatgctgcaatgatgagggcctggagtgtgtgccgaccgaagagagcaacattactatgcaaatcatgcggatcaagcctcaccagggacagcacatcggagagatgtccttcttgcaacacaacaagtgcgaatgccggccgaaaaaggatcgggcgcggcaagaaaatccgtgcggtccatgctcagaacgccgtaagcacttgtttgtacaggacccgcagacgtgcaagtgctcctgtaaaaacacggactcgcgctgcaaggctcgccaactcgagctcaacgaaagaacctgtcggtgcgacaagcctagacgt

SEQ ID NO: 20861 - DNA, 573 bp, synthetic construct
  misc_feature 1..573: note = source = /note="Description of Artificial Sequence: Synthetic coding sequence"
  source 1..573: mol_type = other DNA
atgaactttctgttgagctgggttcactggtctcttgcattgctgctttatctccaccatgcgaagtggtcgcaggccgcccctatggcagaaggaggaggccagaatcaccacgaggtggtcaaattcatggatgtatatcagagatcctattgccacccgattgagacgctggtcgacatatttcaggagtatcccgatgaaatcgagtacatatttaaacccagctgtgttcctctaatgcgttgcgggggatgttgtaacgatgaggggttggagtgtgtgcctacggaggagagtaatatcaccatgcagattatgcgaatcaagccgcatcaggggcaacacataggggaaatgtcatttctgcaacacaacaagtgcgaatgtagaccaaaaaaagaccgcgccagacaggaaaacccatgtggtccctgctcagagcgcagaaagcacctgttcgtgcaggatcctcagacgtgcaagtgttcttgcaagaatacggactctcggtgcaaggcccggcaactcgagttgaacgaaagaacctgtagatgcgacaagccgcggaga

SEQ ID NO: 20862 - DNA, 573 bp, synthetic construct
  misc_feature 1..573: note = source = /note="Description of Artificial Sequence: Synthetic coding sequence"
  source 1..573: mol_type = other DNA
atgaattttctgctgtcatgggtgcattggtcgttagctcttcttctctacctccaccacgctaagtggagccaggcagctcccatggcagagggaggtggccagaaccatcacgaagtggtgaaatttatggacgtataccagagaagctattgtcatccaattgagacccttgtggatatttttcaggaatatcccgacgaaatagaatacatcttcaaaccatcatgtgtgcctctgatgcgatgtggaggctgctgtaatgacgaaggcctggagtgcgtgcccacagaggaatcaaatattacaatgcaaatcatgaggatcaaacctcaccagggtcagcatattggagaaatgagcttcctccaacataataagtgtgagtgtcggccgaagaaagatcgcgcccgccaggagaatccttgcggaccatgctcagaacgccggaaacacctcttcgtccaagatcctcaaacctgtaaatgttcttgcaagaataccgactcccgctgcaaagcccgacagctggagttgaatgagagaacctgccgttgtgataagccaagacgc

SEQ ID NO: 20863 - DNA, 573 bp, synthetic construct
  misc_feature 1..573: note = source = /note="Description of Artificial Sequence: Synthetic coding sequence"
  source 1..573: mol_type = other DNA
atgaattttcttctctcgtgggtgcactggtccctcgcccttcttctctacctgcatcacgcaaaatggagccaggcagcaccaatggctgagggtggcgggcagaatcaccatgaagtggtgaagttcatggatgtgtaccaacggtcgtactgtcatccaattgaaactttggtggacatatttcaagagtacccagatgagattgaatacattttcaagccctcctgcgtgcctctcatgcgttgtggtggctgctgtaacgatgaaggactggagtgtgtgccaaccgaagagtccaacataactatgcagattatgcgtatcaagcctcatcaaggacagcacataggagaaatgagctttctgcaacataacaagtgtgaatgcagacccaagaaagatcgcgcacgccaggaaaatccgtgcggtccatgttccgaacgtaggaaacatctgttcgtgcaagatcctcagacctgcaagtgtagctgcaagaataccgatagccgttgcaaagcaagacagcttgaacttaatgaaagaacgtgtcggtgtgataagcctagacga

SEQ ID NO: 20864 - DNA, 573 bp, synthetic construct
  misc_feature 1..573: note = source = /note="Description of Artificial Sequence: Synthetic coding sequence"
  source 1..573: mol_type = other DNA
atgaacttcctgctctcctgggtgcactggtccctggcgcttctgctgtacttgcatcacgcgaagtggtcgcaagcggcgccgatggcagagggagggggacagaaccatcacgaagtggtgaaattcatggatgtgtaccagcggtcgtactgccaccccattgaaactctggtggacatcttccaggagtacccggacgagatcgaatacatctttaaaccttcttgcgtgccacttatgcggtgcggcggctgctgcaatgacgaggggctcgaatgtgtcccgactgaggaaagcaacatcactatgcagatcatgcgcatcaaaccgcatcaaggtcagcacatcggcgagatgtcgttcctgcaacacaacaagtgcgagtgccggccaaagaaggaccgcgcacggcaggagaatccatgcggaccttgttcagaaaggcgcaagcacctttttgtgcaggatccacaaacctgcaagtgctcatgcaagaacacggacagcagatgtaaagccagacagttggagcttaatgagaggacttgccggtgcgataagccacgccgt

SEQ ID NO: 20865 - DNA, 573 bp, synthetic construct
  misc_feature 1..573: note = source = /note="Description of Artificial Sequence: Synthetic coding sequence"
  source 1..573: mol_type = other DNA
atgaatttcttgttgagttgggttcactggagcctcgcccttctgttgtatttgcaccacgctaaatggtcacaagctgcgcccatggctgagggtggtggtcagaatcaccatgaggtcgtaaaatttatggacgtctatcagagatcctattgtcatcctattgagacattggttgacatcttccaggagtaccctgatgagatcgagtacattttcaaacccagctgcgtcccattaatgcgctgcggagggtgctgtaacgatgaaggtttggaatgtgtgcctactgaggaaagtaatattacgatgcaaattatgcgtatcaagcctcaccagggacagcatattggagagatgtcattcttgcagcataacaaatgcgagtgccggccaaaaaaggatagagctagacaggaaaatccttgtggcccttgctctgagcggaggaaacatctctttgtccaagatccacaaacttgcaagtgctcttgcaaaaatacggatagtcgttgcaaggctcgtcagttagagttgaacgagagaacctgtcggtgtgataaacctaggaga

SEQ ID NO: 20866 - DNA, 573 bp, synthetic construct
  misc_feature 1..573: note = source = /note="Description of Artificial Sequence: Synthetic coding sequence"
  source 1..573: mol_type = other DNA
atgaactttcttcttagctgggttcattggtcgttggctctgttgctgtatctgcatcatgccaaatggtcgcaagccgcccccatggccgaaggaggtggccaaaatcatcacgaagtcgtgaagtttatggacgtgtaccagcggagctactgtcatccaattgaaaccttggtcgatatcttccaggaataccccgatgaaattgaatacattttcaagccttcctgtgttcctctgatgcgttgtggtggatgctgtaatgacgagggactggaatgtgtgcctactgaagagagcaacattactatgcaaatcatgcgcattaagcctcatcaaggtcagcatataggagaaatgtccttcctgcagcacaacaagtgcgaatgtaggcctaaaaaggaccgagcacgccaggaaaacccgtgtgggccgtgctcggaaaggagaaagcacctctttgtgcaggatccacaaacctgtaagtgctcgtgtaaaaacaccgattcccgctgcaaggcacgccagctggaacttaatgaacgtacgtgcagatgtgataagcctcggcgg

SEQ ID NO: 20867 - DNA, 573 bp, synthetic construct
  misc_feature 1..573: note = source = /note="Description of Artificial Sequence: Synthetic coding sequence"
  source 1..573: mol_type = other DNA
atgaatttcctgctgtcatgggtgcattggtccttggcccttctgctgtaccttcaccatgcaaagtggtcccaggctgcgccaatggcggaggggggcggtcagaatcatcacgaagtggtgaagttcatggacgtgtaccagcggtcctactgtcaccccatagagaccctggttgatatattccaggaataccccgatgaaatcgagtatatctttaaaccctcatgcgttccattgatgcgctgtggggggtgctgcaatgacgaaggccttgagtgtgtgcctaccgaggagtcgaatatcactatgcaaattatgaggatcaaaccacatcaagggcagcatattggggagatgtcattcctacagcacaataagtgtgagtgcagaccgaagaaagacagggccagacaggaaaatccttgcggaccttgttccgagcgcagaaaacacctttttgtgcaggaccctcagacatgcaagtgttcctgtaagaacaccgacagcaggtgtaaggctcggcagctcgagctgaacgagcggacatgtaggtgcgataagcccagacga

SEQ ID NO: 20868 - DNA, 573 bp, synthetic construct
  misc_feature 1..573: note = source = /note="Description of Artificial Sequence: Synthetic coding sequence"
  source 1..573: mol_type = other DNA
atgaattttctgctttcgtgggtccattggtcgctggcacttctgctgtacttgcatcacgccaagtggtcacaggcagcccccatggcagaaggaggaggtcagaaccatcatgaagtggtcaaattcatggacgtgtaccagcgttcctactgtcatccgattgaaaccctggtggacatatttcaggaataccccgatgagattgagtacatctttaagccatcatgcgtgcctcttatgcgctgtggtggatgctgcaatgacgaggggctggaatgtgtgcctaccgaagaatcgaacatcactatgcagataatgcgtatcaagcctcatcaaggacaacatatcggcgagatgagctttcttcaacataacaaatgtgaatgtagacctaagaaggatcgcgcacggcaagaaaacccttgcggaccctgcagcgaacgacggaagcatctgttcgtccaggatccccagacttgcaagtgttcatgcaagaataccgattcgagatgcaaggctcggcaactcgagctgaacgaacgcacctgtcggtgtgacaaacctagacga

SEQ ID NO: 20869 - DNA, 573 bp, synthetic construct
  misc_feature 1..573: note = source = /note="Description of Artificial Sequence: Synthetic coding sequence"
  source 1..573: mol_type = other DNA
atgaactttctgctttcgtgggtgcattggagccttgcacttctgctctaccttcatcacgcaaagtggagccaagcagcgcctatggcagaaggtggcggtcaaaatcaccatgaagtcgtgaaattcatggatgtctaccagagatcatactgtcatccaatcgaaactctggtggatatcttccaagagtaccctgacgaaatcgagtacatctttaaaccatcgtgtgtgccactcatgcggtgtggagggtgctgcaacgatgaagggctggagtgtgtgccaaccgaagaatccaacattaccatgcaaatcatgagaatcaagcctcaccagggacaacatatcggtgagatgtcatttttgcaacataacaaatgcgaatgtcgcccgaagaaagacagggcgcggcaggaaaatccttgtgggccttgttcggaaagacgaaaacatctgtttgtgcaagatccgcagacgtgcaagtgctcttgtaagaataccgatagccgatgtaaagcaaggcagctggagctgaacgagaggacctgccgttgtgataagccaagacgc

SEQ ID NO: 20870 - DNA, 573 bp, synthetic construct
  misc_feature 1..573: note = source = /note="Description of Artificial Sequence: Synthetic coding sequence"
  source 1..573: mol_type = other DNA
atgaattttctcctgtcctgggtccattggtccctggccctgctcctgtatcttcatcatgccaaatggtcccaagcagcccctatggccgaaggtggcggtcagaatcatcatgaagtagtcaaattcatggacgtataccaacggtcctactgtcatccaatcgagaccctggtcgacatctttcaagagtatccagacgagattgagtacattttcaaaccatcttgtgtcccactcatgagatgtggtgggtgttgtaacgatgaaggactagaatgcgtgccaaccgaggagagtaacattaccatgcagataatgaggataaagccacaccaggggcagcacattggtgagatgtccttccttcagcacaacaagtgtgagtgccgcccaaagaaagacagggcaagacaggagaatccttgcggcccctgcagcgagcgcagaaaacatttgtttgtacaggatccccaaacttgtaaatgttcatgtaaaaataccgactcgagatgtaaggccagacagcttgagctcaacgagcgaacatgtaggtgcgataaacctcggaga

SEQ ID NO: 20871 - DNA, 573 bp, synthetic construct
  misc_feature 1..573: note = source = /note="Description of Artificial Sequence: Synthetic coding sequence"
  source 1..573: mol_type = other DNA
atgaacttcctgctgtcttgggtacattggagtctggccctgctgctgtatcttcaccacgcgaagtggagccaagcggcaccaatggcagaggggggcggtcagaatcatcacgaggtcgttaagttcatggacgtctatcagagatcttactgtcatccaattgagactctggtggatatcttccaggagtacccagacgagattgaatatattttcaaaccctcctgcgtccccctgatgaggtgcggtggttgttgtaacgacgaggggctggaatgcgtgcccactgaggagagcaacatcactatgcaaatcatgagaatcaaacctcatcaaggccagcacattggagagatgtccttcctgcagcacaacaagtgcgagtgccgtcctaagaaggacagagctaggcaggaaaatccatgcgggccgtgttctgagaggaggaagcacctgtttgtacaggatccccagacttgcaagtgtagttgtaaaaacaccgactcaagatgcaaggcaaggcagctggaacttaatgaacggacctgtcgatgcgataaaccgcgtagg

SEQ ID NO: 20872 - DNA, 573 bp, synthetic construct
  misc_feature 1..573: note = source = /note="Description of Artificial Sequence: Synthetic coding sequence"
  source 1..573: mol_type = other DNA
atgaatttcttactgtcctgggtgcattggtctctggcgctgcttttgtacctgcaccacgctaaatggagtcaagcagccccaatggctgagggaggcggacagaaccaccatgaagtggtgaagtttatggatgtatatcaacgttcttactgccatccaatcgaaacccttgttgatatctttcaggagtaccccgatgaaattgagtatatctttaaacctagctgcgtgccgcttatgagatgcgggggctgctgtaacgatgaaggcctggagtgcgtacctaccgaggaatctaacattacaatgcagattatgcgcatcaagccacaccagggccagcatattggtgagatgagctttctccaacacaacaagtgcgaatgcagacccaaaaaggatagggcacggcaggagaatccgtgtgggccttgctccgagagacgcaagcatctgttcgtacaggaccctcaaacttgtaagtgctcttgtaagaatactgactcacgctgtaaggcccgtcagctggagcttaatgagcgaacgtgccgatgtgacaaaccgcgtagg

SEQ ID NO: 20873 - DNA, 573 bp, synthetic construct
  misc_feature 1..573: note = source = /note="Description of Artificial Sequence: Synthetic coding sequence"
  source 1..573: mol_type = other DNA
atgaactttttactgagctgggtccactggagcttggctctattgttgtacctgcaccacgcgaaatggagccaagctgcgccgatggcagaaggtggcgggcagaaccatcacgaggttgtgaagttcatggatgtgtaccagcgctcttactgtcatcctattgagacattggtggatatcttccaggaatatccggacgagatcgaatacatcttcaaaccgagctgcgtgcctctcatgagatgtggtggttgttgcaacgacgaaggtctcgagtgtgtgccaactgaggaaagcaatataacaatgcaaattatgcgcatcaaaccgcaccaaggtcaacacattggagaaatgagttttctgcaacacaacaagtgcgagtgtcgtccaaagaaggatcgagcccgccaggagaatccgtgtggcccatgctccgagcgcaggaaacaccttttcgttcaggatccacagacttgcaaatgttcatgtaagaacactgactcccggtgcaaagcgcgccaattggaactgaacgaaaggacctgccgttgcgataagccgcgtcgg

SEQ ID NO: 20874 - DNA, 573 bp, synthetic construct
  misc_feature 1..573: note = source = /note="Description of Artificial Sequence: Synthetic coding sequence"
  source 1..573: mol_type = other DNA
atgaacttcctgctgtcgtgggtccattggagtctggcgttgctgctctatctccaccatgccaaatggtcccaggccgcgccgatggctgaaggaggaggtcagaaccatcacgaagtggtgaagttcatggacgtgtaccagcgctcgtactgccacccgatcgagactctggtggatatcttccaagaatacccggacgaaattgaatacatcttcaagccgtcgtgtgtgccacttatgcgctgtggaggatgctgcaatgacgagggactggagtgcgtcccgaccgaagaatcgaacatcactatgcagattatgcggatcaagccacaccagggccagcacatcggtgagatgtcattcctccagcataacaagtgcgaatgcagacccaagaaagatcgtgcacgccaggaaaacccctgcggcccatgctcggagaggcggaagcacctcttcgtgcaggacccgcagacctgtaagtgctcatgcaagaacacggattctcgatgcaaagcgcgccaactggaattgaatgaacgcacctgccgctgcgacaagccgcgccgc

SEQ ID NO: 20875 - DNA, 573 bp, synthetic construct
  misc_feature 1..573: note = source = /note="Description of Artificial Sequence: Synthetic coding sequence"
  source 1..573: mol_type = other DNA
atgaacttcctcctgagctgggtccattggtctttggcgctcctgctttatttgcaccatgcgaagtggagtcaagcagcccccatggccgaaggtgggggccagaatcatcatgaagtagttaagttcatggacgtgtaccagaggtcatattgccatcccattgagacccttgttgacatcttccaagagtatccagatgaaattgaatatattttcaagcccagctgcgtgccgctgatgaggtgcggaggatgctgcaatgacgagggcctggaatgcgttccaaccgaggaatctaatatcaccatgcaaatcatgcgtattaagcctcaccagggacagcatattggggaaatgagttttctgcaacacaacaaatgtgagtgtaggccaaagaaggatcgagctcggcaggagaatccttgtgggccctgttctgagcgccggaaacacctgtttgttcaagatccgcagacgtgtaagtgctcatgtaaaaataccgactcaaggtgcaaagcccgccagctcgagctgaatgagagaacatgtcggtgcgacaagccacgccgt

SEQ ID NO: 20876 - DNA, 573 bp, synthetic construct
  misc_feature 1..573: note = source = /note="Description of Artificial Sequence: Synthetic coding sequence"
  source 1..573: mol_type = other DNA
atgaacttcctcctgagctgggtgcattggtcgcttgcactccttctttacctgcatcatgcgaagtggtcccaagccgcaccaatggcagaaggaggtgggcagaatcaccatgaagtggtcaagtttatggatgtgtaccaacgttcctactgtcatcctattgaaaccctggtcgacatttttcaggaataccctgatgaaattgaatacatctttaagccaagctgcgttcctctgatgcgatgtggggggtgttgcaacgatgagggactggagtgtgtgcccaccgaagagtcgaacataactatgcagattatgcgtatcaaaccccaccaaggacaacacatcggagagatgagttttctgcagcataacaaatgtgaatgtcggccgaagaaagacagagcacgccaagaaaatccctgcggcccttgcagtgaacggcggaagcacctcttcgtgcaggacccacaaacctgcaagtgttcctgtaagaacactgattccagatgcaaggcacggcagctggaacttaatgagaggacctgtcgctgtgacaaacctcgtaga

SEQ ID NO: 20877 - DNA, 573 bp, synthetic construct; identical to SEQ ID NO: 20872
  misc_feature 1..573: note = source = /note="Description of Artificial Sequence: Synthetic coding sequence"
  source 1..573: mol_type = other DNA

SEQ ID NO: 20878 - DNA, 573 bp, synthetic construct
  misc_feature 1..573: note = source = /note="Description of Artificial Sequence: Synthetic coding sequence"
  source 1..573: mol_type = other DNA
atgaactttcttctctcttgggtgcattggtctctggctctgctgctctatttgcaccacgccaaatggtcacaggcggcaccaatggctgagggaggcggccaaaatcatcatgaagtggtgaagttcatggatgtgtatcagagatcgtactgtcatccgattgaaactctcgttgatatttttcaggagtatccggacgagatcgaatacattttcaagccctcttgcgtgcctcttatgcgatgcggcggctgctgtaacgacgagggcctggaatgtgtgcccactgaggagagcaatataaccatgcagattatgagaatcaagccgcaccaggggcaacacattggtgagatgtcgttcctgcagcacaacaaatgcgagtgccggccgaagaaggatagagcgagacaggagaatccctgtggcccatgctctgagcgccggaagcacctgttcgtgcaggacccacagacgtgcaagtgtagctgtaagaatacggactcccgttgtaaggcaagacagttagagctgaatgagcggacctgcaggtgcgataaaccaaggagg

SEQ ID NO: 20879 - DNA, 573 bp, synthetic construct
  misc_feature 1..573: note = source = /note="Description of Artificial Sequence: Synthetic coding sequence"
  source 1..573: mol_type = other DNA
atgaacttccttctctcctgggtccactggtcactggcactcctgttgtacctgcaccatgccaagtggtctcaggcagccccaatggcggaaggaggaggtcagaaccaccatgaagttgtgaagttcatggatgtgtaccagaggtcttattgtcatccaattgaaaccttagtcgacatattccaagaatatcccgatgagatcgagtacatcttcaaaccctcatgtgtgccactcatgagatgcggcgggtgctgcaatgatgagggattggagtgcgtgcccactgaagaatcaaatattaccatgcagattatgaggatcaaaccccaccaaggtcagcatattggagagatgagcttcctgcagcacaacaagtgcgagtgtagacccaaaaaggatcgagccagacaggagaatccctgcggaccctgttccgagagacgcaaacatttgtttgtgcaggacccccagacatgtaagtgttcttgcaagaacaccgattccaggtgtaaggcccgacagctggagctgaacgagagaacctgtagatgcgataaacctcgaaga

SEQ ID NO: 20880 - DNA, 573 bp, synthetic construct
  misc_feature 1..573: note = source = /note="Description of Artificial Sequence: Synthetic coding sequence"
  source 1..573: mol_type = other DNA
atgaattttcttttgtcgtgggtccattggtccctggccctgttgctgtacttgcaccatgccaagtggtcccaagcagcacctatggcggaaggcggtggacagaaccatcacgaagtggtcaaattcatggatgtgtaccagagatcctactgtcaccctattgagactttggtggacattttccaggaatacccagatgagatcgaatacatctttaagccttcgtgtgtcccactgatgcgctgtggaggttgttgcaacgacgaaggactggagtgcgtgccaactgaagaatccaacattactatgcaaatcatgagaattaagccgcatcaaggacaacatataggtgaaatgtcattccttcagcataacaagtgtgaatgtcggcctaagaaggaccgggccagacaggagaatccatgcggcccatgctccgagcgccgcaaacatctctttgtgcaggatcctcaaacctgcaagtgttcatgtaagaacaccgattctcgttgtaaagcgcggcaacttgaactgaacgaaagaacctgtcgctgtgataagcctcggcgg

SEQ ID NO: 20881 - DNA, 573 bp, synthetic construct
  misc_feature 1..573: note = source = /note="Description of Artificial Sequence: Synthetic coding sequence"
  source 1..573: mol_type = other DNA
atgaattttcttctgtcctgggtccattggtcgctcgccctgctgctctatttgcatcatgctaaatggtcacaagcagcaccaatggcggaagggggaggacaaaaccaccatgaagttgtgaaattcatggatgtgtaccaaagatcatattgtcatcctatagaaacccttgttgatatcttccaggaataccccgatgaaattgagtacattttcaagcctagctgtgtcccactgatgcggtgtggtggctgttgtaatgacgaaggactcgaatgcgtgccgaccgaagaatccaacattaccatgcagattatgcggataaagccacatcaaggacaacacataggtgagatgtcattccttcagcataacaaatgtgaatgcaggcctaagaaggaccgagcaagacaagaaaacccgtgtggaccatgttccgagagacggaagcacctgtttgtgcaggacccacaaacctgcaaatgtagctgtaaaaacacggatagcaggtgtaaggcacggcaacttgaacttaacgaacgtacttgtcggtgtgataagcctagacgt

SEQ ID NO: 20882 - DNA, 573 bp, synthetic construct
  misc_feature 1..573: note = source = /note="Description of Artificial Sequence: Synthetic coding sequence"
  source 1..573: mol_type = other DNA
atgaattttctcctgagctgggtgcattggtcgctggcactgctcctttacctgcatcacgcgaagtggtcgcaggctgcgccgatggccgagggcgggggtcaaaaccaccacgaagtcgtgaagttcatggacgtgtaccagagatcgtactgccacccgatcgaaactctggttgacatcttccaggaataccccgatgaaatcgagtatatctttaaaccgtcctgtgtgccactgatgcggtgcggaggatgttgcaatgacgagggactggaatgcgtgcccaccgaggagtcaaacattaccatgcaaatcatgaggattaagcctcatcaggggcaacacatcggcgaaatgagcttcctccagcacaacaaatgcgaatgtcgcccaaagaaagaccgcgcccggcaagagaacccttgcggaccgtgctccgaaagacgcaagcatttgttcgtccaggatccgcagacctgcaaatgttcctgtaagaatactgattcacgatgcaaggccagacagctcgaattgaacgagcggacgtgccggtgcgacaagccacgtcgc

SEQ ID NO: 20883 - DNA, 573 bp, synthetic construct
  misc_feature 1..573: note = source = /note="Description of Artificial Sequence: Synthetic coding sequence"
  source 1..573: mol_type = other DNA
atgaatttcctactttcgtgggtgcactggtctctggcattactactgtacttgcaccacgctaagtggtctcaggctgctcccatggctgaaggggggggacagaaccaccacgaggtagtaaagttcatggatgtatatcaacggtcatactgccacccaatcgaaacactggtggatatcttccaggaatatccggatgagatcgaatatatcttcaaaccctcatgtgtgccccttatgaggtgtggggggtgctgtaacgacgaagggttagaatgcgtgcccacagaggaatcaaacatcactatgcagattatgcggataaaaccccaccagggacagcatataggagaaatgtcgtttctccagcacaataaatgcgaatgtcgtccaaaaaaagatcgggcgcgccaggaaaatccctgcggaccctgctcagaaaggcgaaaacatctttttgttcaggacccccagacatgtaagtgttcttgtaaaaacacagattcaaggtgcaaagctcggcagttagaactaaacgaacggacttgccgatgcgataaacctagaaga

SEQ ID NO: 20884 - DNA, 573 bp, synthetic construct
  misc_feature 1..573: note = source = /note="Description of Artificial Sequence: Synthetic coding sequence"
  source 1..573: mol_type = other DNA
atgaacttcctcctgagctgggtacactggagcctagccttgctgctatacctgcaccacgcgaagtggtcacaagccgcgccaatggccgaaggcggtggacaaaatcaccacgaggtcgtcaagttcatggatgtttatcagcgcagttattgtcacccaatcgaaacactggtggatatcttccaagagtaccctgatgaaattgagtacatctttaagccttcctgcgtgccgctgatgcgctgcggtggctgttgtaacgatgaaggactagaatgcgtgccgactgaagaaagcaatatcaccatgcaaattatgcggatcaagccccaccagggccaacacattggtgagatgagttttctccagcataataaatgtgagtgccgccccaaaaaggatagggcaagacaggaaaacccatgcggaccatgctcggagcggcggaagcacttgtttgtccaggatcctcagacatgcaagtgctcgtgtaaaaatacagactctcgttgtaaggcccgccaactggagctgaacgagagaacgtgccgatgcgacaagcctcgacgc

SEQ ID NO: 20885 - DNA, 573 bp, synthetic construct
  misc_feature 1..573: note = source = /note="Description of Artificial Sequence: Synthetic coding sequence"
  source 1..573: mol_type = other DNA
atgaacttcctgctttcttgggtgcactggtctttggccctcctcctgtacctgcatcacgccaagtggagtcaggctgcccctatggccgaggggggaggacagaatcaccatgaggtggttaagttcatggacgtgtatcaaagatcatactgtcaccctattgagacactggtggatattttccaggaataccctgacgaaatcgagtacattttcaagccctcttgtgtgcctctgatgcgctgtggcggatgctgcaacgacgaaggtctggaatgtgtcccaacggaagagtccaacattactatgcagataatgcggataaagcctcaccaggggcaacacattggcgagatgtctttcctgcagcacaacaagtgcgaatgcagacctaaaaaagatcgggcaaggcaggagaatccctgcggaccttgcagcgagaggcggaaacacctctttgtacaggaccctcagacctgcaagtgttcttgtaaaaacacagactcccggtgtaaagctagacagttggagctgaacgagaggacttgcagatgtgacaaacctagaagg

SEQ ID NO: 20886 - DNA, 573 bp, synthetic construct
  misc_feature 1..573: note = source = /note="Description of Artificial Sequence: Synthetic coding sequence"
  source 1..573: mol_type = other DNA
atgaactttctgttgtcctgggtgcattggtccctggctcttctcttgtacctgcaccacgcaaaatggagccaggccgccccgatggcagagggagggggccagaaccaccatgaagtcgtgaagttcatggacgtctaccagcgctcctactgccatccgatcgaaactctggtggacatcttccaggagtacccggatgagatcgagtatatcttcaagccgagctgcgtgccactcatgcgctgtggaggatgttgcaacgacgagggactcgagtgcgtcccaactgaggaaagcaacatcaccatgcagatcatgcgaataaagccgcaccagggacagcatattggggagatgtcattcctgcaacataacaaatgcgaatgccgccctaagaaagaccgggcccgccaggaaaatccctgcggaccgtgttccgagcgcaggaagcacctgtttgtgcaggatcctcagacctgtaagtgcagctgcaagaacaccgattccagatgcaaggcaaggcagctggaactgaacgagcgcacctgcagatgcgacaagcccaggaga

SEQ ID NO: 20887 - DNA, 573 bp, synthetic construct
  misc_feature 1..573: note = source = /note="Description of Artificial Sequence: Synthetic coding sequence"
  source 1..573: mol_type = other DNA
atgaacttccttctctcttgggtgcactggagcctggccctgctgctctacctccaccatgccaaatggtcgcaggccgctccgatggccgagggagggggccaaaaccatcacgaagtggtgaagttcatggatgtgtatcagagatcgtactgccaccccattgagactctggtggacatcttccaagaatacccagatgaaatcgagtacatctttaagcccagctgcgtccccctgatgcggtgcggaggatgctgcaatgacgagggcctggagtgcgtgcctaccgaagagtcgaacattaccatgcagattatgcggatcaagccgcatcaaggacaacatatcggagaaatgtcatttttgcagcacaacaaatgcgagtgtcgcccaaagaaagacagggcccgccaggaaaatccgtgtggtccgtgtagcgagcgccgcaaacacctcttcgtgcaagaccctcagacttgtaagtgttcctgcaaaaacacggattcaagatgcaaggccagacagctcgaactgaacgaacgcacctgcagatgcgacaagcctagacgc

SEQ ID NO: 20888 - DNA, 573 bp, synthetic construct
  misc_feature 1..573: note = source = /note="Description of Artificial Sequence: Synthetic coding sequence"
  source 1..573: mol_type = other DNA
atgaatttcctgctttcctgggtccactggtcgctcgcacttcttttgtaccttcatcacgcgaaatggtcacaggctgctcccatggcagagggtgggggtcagaaccatcacgaggtggtcaagtttatggatgtataccaacgctcctactgtcacccaattgaaaccctggttgacatatttcaagaataccccgacgaaattgaatacattttcaagccatcgtgcgtgccacttatgcgatgtggaggatgctgtaatgatgagggcctggaatgcgtgccgacggaagaatcaaacatcaccatgcaaatcatgcgtatcaaaccacatcaggggcagcatattggagaaatgagcttcctgcagcacaacaagtgcgaatgcagaccgaaaaaagatagggcaaggcaggaaaacccttgtgggccttgtagcgaacgaaggaagcatctgtttgtgcaagatccgcaaacctgcaagtgcagctgtaagaatactgattcaagatgtaaagcacgacagctcgaattgaacgagcggacttgtaggtgtgacaagcctcggcgc

SEQ ID NO: 20889 - DNA, 573 bp, synthetic construct
  misc_feature 1..573: note = source = /note="Description of Artificial Sequence: Synthetic coding sequence"
  source 1..573: mol_type = other DNA
atgaacttcttgctctcctgggtccattggagcctggctctgcttctgtatctccatcacgccaaatggtcgcaggcagctcctatggcggaaggcggaggacagaaccatcacgaagtggtgaagttcatggacgtctaccaacggagctactgccatccgatcgaaactctcgtggacatctttcaagagtacccagatgagatcgaatacatcttcaagccatcatgcgtgccgctgatgcgctgcggcggttgttgcaacgatgagggactggagtgtgtgccgaccgaagagtcgaatatcactatgcaaatcatgcgcataaagccacaccaaggtcagcacattggggaaatgtcatttctccaacacaacaagtgtgagtgcagaccaaagaaagatcgtgccaggcaagagaacccatgcggaccgtgctccgaacgacgcaagcatttgttcgtccaggacccgcagacttgcaagtgttcgtgcaagaataccgactccaggtgtaaagctcgacaattggaactcaatgagcgcacctgccgctgcgacaagcctaggaga

SEQ ID NO: 20890 - DNA, 573 bp, synthetic construct
  misc_feature 1..573: note = source = /note="Description of Artificial Sequence: Synthetic coding sequence"
  source 1..573: mol_type = other DNA
atgaacttccttcttagctgggtacactggagtctggccctgctgttgtatcttcaccacgcgaaatggagccaggcagcaccgatggccgaaggaggaggtcagaatcaccacgaagtggtcaaattcatggacgtataccagagatcctattgtcatccaatcgagactctggttgacatctttcaggagtaccctgatgaaatagagtacattttcaagccaagctgcgtgccactgatgcggtgcgggggctgctgcaacgacgagggacttgagtgcgtgcccactgaagagagcaacatcacgatgcagattatgaggattaagccacaccaaggacagcacatcggcgagatgtcatttttgcaacataataagtgtgaatgtaggcccaagaaagatcgggcccgccaggagaacccatgtggcccttgtagcgagagaaggaaacaccttttcgtgcaagacccgcaaacatgcaagtgttcctgtaaaaacacggactcccggtgtaaggcacggcagctggagctcaacgagcgcacatgtagatgcgacaagcctaggcga

SEQ ID NO: 20891 - DNA, 573 bp, synthetic construct
  misc_feature 1..573: note = source = /note="Description of Artificial Sequence: Synthetic coding sequence"
  source 1..573: mol_type = other DNA
atgaatttccttttaagttgggttcactggtcacttgcactgttgctgtacctccatcatgcaaagtggtcccaagcggcacctatggcggagggtggaggccagaaccatcatgaggtggtgaaattcatggatgtataccagagatcctattgccaccctattgagactttggtggacatttttcaggagtacccagatgaaatcgagtatatatttaagcctagctgcgtaccgttgatgaggtgcggtggctgctgcaacgatgagggcctggaatgcgtgccgacagaagaatccaacattaccatgcagataatgcgcatcaagccccatcaaggccaacacattggggaaatgagcttcctacagcacaacaagtgcgagtgtagacccaagaaggacagggctcggcaggagaatccatgcggaccctgttcagaaaggcggaaacatctgtttgtgcaggatccacagacctgtaagtgctcatgtaagaataccgattctagatgtaaagcacgccagctggaactcaacgagcgtacctgccggtgtgataagcctaggcgg

SEQ ID NO: 20892 - DNA, 573 bp, synthetic construct
  misc_feature 1..573: note = source = /note="Description of Artificial Sequence: Synthetic coding sequence"
  source 1..573: mol_type = other DNA
atgaatttcctgctctcctgggtgcattggtctctcgcactgctcctgtacctgcaccacgccaagtggagtcaggccgcccccatggctgaaggcggaggacagaaccaccacgaggttgtcaagtttatggatgtataccagaggtcttactgtcatccaattgagaccctggttgacatcttccaggaatacccggatgagattgagtacattttcaagccatcgtgcgtgcccttgatgcggtgtggaggctgctgcaacgacgagggcctggaatgcgttccaacagaggaatctaatattaccatgcagatcatgcggataaagccacaccaaggccagcacattggcgaaatgtcattcctccagcacaacaaatgcgagtgccggccgaagaaagatcgggcacggcaggaaaacccatgcggtccttgttctgaacggaggaagcacctgtttgtccaagatcctcaaacctgcaagtgttcctgtaagaacaccgacagccggtgcaaggcacggcaactggagttaaatgaacgcacgtgccggtgtgataagccaaggagg

SEQ ID NO: 20893 - DNA, 573 bp, synthetic construct
  misc_feature 1..573: note = source = /note="Description of Artificial Sequence: Synthetic coding sequence"
  source 1..573: mol_type = other DNA
atgaattttctgctgtcttgggtccattggagcctggccctactgctgtacctgcaccatgccaaatggagccaggcagctcccatggcagaaggcggcggtcagaaccaccacgaagttgtgaagttcatggatgtgtaccagcggagctactgccaccccatcgaaaccctagtagacatatttcaggaataccccgacgagattgaatacatattcaagccatcatgtgtgcccttgatgaggtgcgggggctgttgcaacgacgaaggccttgagtgtgttcccacagaagaatcgaatatcacaatgcagatcatgcggataaaacctcaccaagggcagcacatcggggagatgagctttctgcagcataataagtgcgagtgtcgtccaaaaaaagatcgggcgcgacaggagaatccttgcggcccgtgcagcgagcgtaggaagcatctgtttgttcaagacccacagacctgtaagtgctcctgcaagaataccgattcgagatgcaaggcacggcagctggagctaaacgaacgtacttgtaggtgcgataaacccaggcgc

SEQ ID NO: 20894 - DNA, 573 bp, synthetic construct
  misc_feature 1..573: note = source = /note="Description of Artificial Sequence: Synthetic coding sequence"
  source 1..573: mol_type = other DNA
atgaattttctgctttcgtgggtgcactggagcctggcacttctcctttacctccaccatgccaaatggtcacaggctgcacctatggcagagggtggaggacaaaaccatcatgaagtggtgaagttcatggatgtgtatcaacggagctactgtcatcctattgagactcttgtcgatatcttccaagaataccctgatgaaattgaatacattttcaagccaagctgtgtgccactgatgagatgcggaggctgttgcaacgacgagggacttgaatgtgtcccaaccgaagagagcaacataacgatgcagataatgcgtattaagcctcatcaaggacaacatattggcgaaatgtcctttctccagcacaacaaatgcgaatgccgccctaagaaagatcgggcaagacaggaaaacccctgcggtccatgtagtgaaagaaggaaacatttgtttgttcaagatcctcaaacttgcaagtgtagctgtaagaacaccgattcgcgctgtaaggcacgtcagcttgagctcaatgaaaggacctgcaggtgcgataagccacgccgc

SEQ ID NO: 20895 - DNA, 573 bp, synthetic construct
  misc_feature 1..573: note = source = /note="Description of Artificial Sequence: Synthetic coding sequence"
  source 1..573: mol_type = other DNA
atgaacttcctgctgtcctgggtccactggtcccttgcactgctgctgtacttgcatcatgcaaagtggagccaggccgcaccgatggccgaggggggtggccagaaccatcatgaggtcgtgaagttcatggacgtgtaccagcgctcttactgtcatccaatcgaaactctcgtggacatcttccaggagtacccggatgagatcgagtacatctttaagccgtcatgcgtgcctctgatgcggtgtggagggtgttgcaatgacgaagggctggaatgcgtgcctactgaggaatccaacatcaccatgcagattatgcggatcaagccgcatcagggacaacacatcggcgaaatgtcatttctgcagcacaacaagtgcgagtgccgaccgaaaaaggatcgagctcgccaggaaaacccgtgcggcccgtgttcagagcggcggaagcacctcttcgtccaagacccccagacgtgcaagtgctcgtgcaagaacaccgactcacgctgcaaagcccgccagcttgaactgaacgaaaggacctgccgctgtgataagccaagaaga

SEQ ID NO: 20896 - DNA, 573 bp, synthetic construct
  misc_feature 1..573: note = source = /note="Description of Artificial Sequence: Synthetic coding sequence"
  source 1..573: mol_type = other DNA
atgaattttttgctgagttgggtgcattggtccctcgccctgctgctctacctgcatcatgctaagtggtcccaggcagctccaatggcagaaggggggggtcagaaccatcatgaagttgtcaagtttatggacgtgtaccagaggtcatattgccaccctatcgagaccttagtcgatattttccaagagtatcctgacgagattgagtatatttttaagccatcgtgtgtgcctctcatgagatgcggcggatgttgcaatgacgaagggttggaatgtgtcccgacagaggagagtaatatcacaatgcaaattatgcgtatcaaaccccatcagggtcagcacattggggaaatgagctttcttcaacataacaagtgcgaatgcagaccgaagaaggacagagcacgacaggagaatccttgcgggccctgttccgagcgacgtaaacatttgttcgttcaggacccacagacatgtaagtgttcttgcaaaaataccgattctaggtgcaaagctagacaactggagttgaacgaacgaacatgccgctgcgacaaacccaggaga

SEQ ID NO: 20897 - DNA, 573 bp, synthetic construct
  misc_feature 1..573: note = source = /note="Description of Artificial Sequence: Synthetic coding sequence"
  source 1..573: mol_type = other DNA
atgaactttctgctcagctgggttcattggtccctcgccttgctcctgtatctgcaccatgcgaagtggtcacaggccgctcctatggcagaaggtggtggccagaatcaccacgaggtcgtgaaatttatggatgtctaccagagatcctactgtcatcccatcgagacactggtcgacatttttcaggaatatcccgatgagatcgagtatattttcaagccgagttgtgttcccttgatgcggtgtggcggttgttgtaacgatgaaggacttgagtgcgtgccgactgaagaatccaacatcactatgcaaattatgagaattaagccacatcaaggacagcatatcggcgaaatgagcttcctgcaacacaacaaatgcgagtgccgacctaagaaagacagggcgcgccaagagaacccatgtggcccatgttccgagaggcgcaaacatctctttgttcaagacccccagacctgtaagtgcagctgcaagaacacggactctcggtgtaaggccaggcagcttgaactcaatgagagaacctgtcggtgtgataaacctcggaga

SEQ ID NO: 20898 - DNA, 573 bp, synthetic construct
  misc_feature 1..573: note = source = /note="Description of Artificial Sequence: Synthetic coding sequence"
  source 1..573: mol_type = other DNA
atgaactttcttctgtcctgggtgcattggtcattggcattgctcctttaccttcatcacgccaagtggtcgcaggcagcccccatggcagagggtggggggcaaaatcatcacgaagtggtgaagtttatggatgtctaccaacgcagttactgccaccctatcgaaacccttgtggacatctttcaggaatacccagatgaaattgaatacatcttcaagccctcgtgtgtgccgctgatgcgctgtggaggatgttgcaacgatgaaggtcttgagtgtgtgccaactgaagaatcaaacataacgatgcaaatcatgaggatcaagcctcaccaagggcaacacattggagagatgtcgttcctccaacataacaagtgcgagtgtcggccaaagaaggaccgcgcgagacaggaaaatccttgcggtccctgctcagaacgtcggaaacatctgtttgtccaggatcctcagacctgtaagtgttcctgcaaaaacactgactcccggtgcaaagcgagacaactggaactcaacgaacgcacttgccgttgcgataagcctaggaga

SEQ ID NO: 20899 - DNA, 573 bp, synthetic construct
  misc_feature 1..573: note = source = /note="Description of Artificial Sequence: Synthetic coding sequence"
  source 1..573: mol_type = other DNA
atgaatttcctcctcagctgggtgcactggagcttggctctgctgctttacctacaccacgccaaatggagccaggccgccccaatggcagaggggggggggcagaaccatcacgaggtcgtcaagtttatggacgtgtatcagcgaagctattgccacccaattgagactctggtggacatattccaggaatatcccgacgagatcgaatacatattcaaacccagctgtgtgcctttaatgcgttgcggaggctgttgtaacgatgaggggttagagtgtgttccaactgaagaaagtaatatcacaatgcagataatgagaattaagccccaccaaggacaacatatcggtgagatgagcttcctgcagcataataagtgtgagtgcagacccaaaaaagaccgggcccgccaagaaaacccttgcggaccctgcagcgagcgccgcaaacatttgttcgtgcaagatccccaaacatgcaaatgctcctgcaaaaatacagactctcgatgtaaggctagacagctggaactcaacgagcgtacgtgcaggtgtgacaagccaagacgg

SEQ ID NO: 20900 - DNA, 573 bp, synthetic construct
  misc_feature 1..573: note = source = /note="Description of Artificial Sequence: Synthetic coding sequence"
  source 1..573: mol_type = other DNA
atgaactttttgctttcgtgggtgcattggtcattagctcttctgctatatctgcatcatgctaagtggagtcaagcggctccaatggcggaaggaggtgggcagaaccaccatgaagttgtcaaatttatggatgtatatcaacggtcttactgccacccgatcgaaacgttggtagacatctttcaggaatatccggatgaaattgaatacattttcaaaccttcttgtgtaccccttatgcgttgtggcggatgttgtaacgatgagggccttgaatgtgtcccgacggaggaaagcaacattaccatgcagatcatgcgcatcaaaccacatcaaggccagcatattggcgaaatgagttttttgcagcataataaatgcgaatgccgcccaaagaaagaccgtgcgaggcaggagaacccgtgtggcccgtgttctgaacgtcgaaaacatctttttgttcaagatcctcaaacttgcaaatgttcatgtaaaaacaccgatagccggtgtaaagcaagacagttagaactcaacgaacgtacgtgccgttgtgataaaccgagacgt

SEQ ID NO: 20901 - DNA, 573 bp, synthetic construct
  misc_feature 1..573: note = source = /note="Description of Artificial Sequence: Synthetic coding sequence"
  source 1..573: mol_type = other DNA
atgaatttcctgctgagctgggtgcactggagtctcgcactgcttctgtacttgcaccatgctaagtggtcgcaagcagcgcctatggccgaagggggaggacaaaaccatcatgaagtggtgaagttcatggatgtgtaccagagaagctattgtcacccaatcgaaactttggtggacatctttcaggaataccccgatgaaatcgagtacattttcaaaccttcctgtgtccccctgatgcgatgtggtggatgttgtaatgatgaaggattggaatgtgtgcccaccgaggaatcgaatatcactatgcagattatgcggattaaacctcaccaggggcagcatataggagagatgtcgtttcttcaacacaacaagtgcgaatgccgtcctaagaaggaccgagcacgacaagaaaacccatgtggtccttgttcagagcgccgtaaacatttgtttgtgcaggatccgcaaacgtgcaagtgtagctgtaagaacactgatagcagatgtaaggcaaggcaacttgagctcaacgaaagaacttgccgatgcgacaaaccgcggaga

SEQ ID NO: 20902 - DNA, 573 bp, synthetic construct
  misc_feature 1..573: note = source = /note="Description of Artificial Sequence: Synthetic coding sequence"
  source 1..573: mol_type = other DNA
atgaactttttattgagctgggtacattggtccttagcactattactctacttgcatcatgctaaatggtcacaggccgcccccatggcggaagggggaggccagaaccaccatgaggtggtcaagtttatggacgtgtaccaacggagttattgccatcccatcgagacactagtcgatattttccaggaataccctgacgagatcgagtatatcttcaaaccgtcctgtgtgcctctgatgagatgtggaggttgttgtaacgacgaaggtcttgaatgcgtacccaccgaagaaagcaatatcaccatgcagattatgcgcattaagccccaccaggggcagcacataggagaaatgagctttctgcaacacaataaatgcgagtgtcgtccgaagaaggatcgcgctcgccaggagaatccatgcggaccgtgctccgagaggcgtaagcacttgtttgtgcaagatccacagacctgcaagtgttcctgtaagaacactgattccagatgcaaagcgagacagctggagctcaacgaaagaacttgccgatgtgacaaaccgcgacgc

SEQ ID NO: 20903 - DNA, 573 bp, synthetic construct
  misc_feature 1..573: note = source = /note="Description of Artificial Sequence: Synthetic coding sequence"
  source 1..573: mol_type = other DNA
atgaatttcttgctcagctgggtgcactggtcccttgctcttctcttgtacctgcaccatgccaaatggtcacaggcagcccctatggcggagggagggggacagaatcaccacgaggttgtgaaattcatggatgtgtaccagcggtcgtactgccaccctatcgagactctagtagacatttttcaggagtaccctgacgagatagaatatatcttcaagccgagttgcgttcctcttatgaggtgcggcggctgctgcaatgacgagggtctcgaatgcgtcccgaccgaggagtctaacattacaatgcaaattatgcgcattaaacctcatcaaggtcaacacatcggggaaatgagcttcttgcagcacaacaaatgcgaatgccgccccaaaaaggacagagcacggcaggagaacccttgcgggccttgtagtgagagaaggaaacatctcttcgtccaggatcctcagacctgtaagtgttcatgcaagaacaccgacagtcgctgcaaagcacgacagctggagttgaatgaacgaacttgccggtgcgacaaaccacggcga

SEQ ID NO: 20904 - DNA, 573 bp, synthetic construct
  misc_feature 1..573: note = source = /note="Description of Artificial Sequence: Synthetic coding sequence"
  source 1..573: mol_type = other DNA
atgaacttcctgctcagctgggtccactggtcgctggccctgttgctgtacctccaccacgctaagtggagccaggctgccccgatggcggaaggtggaggccagaaccaccatgaggtcgtgaagtttatggacgtgtaccagcgatcatactgccatccgatcgaaacgcttgtcgatatcttccaggagtacccggacgagatcgagtacatcttcaaaccttcgtgcgtgccgctcatgcgctgtggaggctgttgcaacgatgaaggacttgagtgtgtcccaactgaggaatctaacatcaccatgcagatcatgcgcatcaagccgcatcaggggcagcatataggagaaatgagcttcctgcagcacaataagtgcgaatgtaggccaaagaaagatagggcccgccaggagaacccatgcggcccatgctcagagcggcgaaaacacctgtttgttcaagatccgcagacctgcaagtgctcgtgcaagaacaccgactcgcggtgcaaggcaagacaactggaactgaatgaaagaacctgccgctgcgataaaccgagaaga

SEQ ID NO: 20905 - DNA, 573 bp, synthetic construct
  misc_feature 1..573: note = source = /note="Description of Artificial Sequence: Synthetic coding sequence"
  source 1..573: mol_type = other DNA
atgaattttctcctcagctgggtgcactggtcactcgctttgctgttatacctgcatcacgctaaatggtcacaagctgcccctatggctgagggaggcggtcagaatcaccacgaggttgtcaagttcatggatgtttaccagcgctcatactgtcatcccatcgagaccctggttgatatcttccaagaatatcctgacgaaatagagtacatcttcaagccgtcttgcgttccactcatgaggtgtggaggttgctgtaatgatgaaggccttgagtgcgttcccacagaagaaagcaatataacaatgcagattatgcgaatcaagccccaccaggggcagcatatcggggagatgtcatttctgcagcacaacaaatgcgaatgccgtcctaagaaggatagagcacggcaggaaaacccttgcggtccttgctcagagcgtcggaaacatctcttcgtgcaggatccccaaacatgtaaatgtagctgtaagaatacagatagccgctgtaaagctaggcagcttgaattgaatgagcgtacgtgtcgctgtgacaagccgcgaagg

SEQ ID NO: 20906 - DNA, 573 bp, synthetic construct
  misc_feature 1..573: note = source = /note="Description of Artificial Sequence: Synthetic coding sequence"
  source 1..573: mol_type = other DNA
atgaatttcctcctgtcttgggtgcattggagccttgcccttttgttgtacctgcaccacgcaaagtggagccaggccgcacctatggcagaaggaggcggacagaatcaccatgaggtagttaagtttatggacgtgtatcaaagatcctactgccacccaattgaaacactggttgatatcttccaagagtaccctgatgagatcgaatatatctttaagccttcttgcgtgcctctgatgcggtgtggaggatgctgtaacgacgagggactggagtgtgtgccaaccgaggagagcaatatcactatgcagatcatgcggatcaagccccaccaaggccaacatatcggggagatgagcttcctgcagcacaataaatgtgagtgcagacccaagaaagaccgcgcaaggcaggaaaatccctgcggaccttgcagtgagcgccgcaaacatttatttgtgcaggacccccagacctgtaagtgctcctgtaaaaacacggacagcaggtgcaaggcccggcagctggagctgaacgaacgcacttgccgctgtgataagcccagaaga

SEQ ID NO: 20907 - DNA, 573 bp, synthetic construct
  misc_feature 1..573: note = source = /note="Description of Artificial Sequence: Synthetic coding sequence"
  source 1..573: mol_type = other DNA
atgaacttcctgctttcctgggtccattggtcgctcgcactgctcctgtacttgcatcacgccaaatggtcgcaggcagctccgatggccgaaggaggtggacagaaccaccacgaagttgtgaagtttatggacgtgtaccagcgatcgtactgtcaccctatcgagactctcgttgacatctttcaggagtatcccgacgagatcgagtacattttcaaaccatcctgtgtgcccctgatgcgctgcggagggtgctgcaatgatgaggggctcgagtgcgtcccaactgaggagtcgaacataactatgcagatcatgcgaatcaagccccatcaaggtcaacacatcggagaaatgtcatttctgcagcacaacaagtgtgagtgtaggccaaagaaggatagagctcgccaggaaaatccatgtggaccttgcagcgaacgccggaagcatctgttcgtgcaggatccacaaacctgcaagtgctcgtgcaaaaacaccgattcacggtgtaaagcccgccagctggaactcaatgagagaacctgccgctgcgacaagccgcgcaga

SEQ ID NO: 20908 - DNA, 573 bp, synthetic construct
  misc_feature 1..573: note = source = /note="Description of Artificial Sequence: Synthetic coding sequence"
  source 1..573: mol_type = other DNA
atgaatttccttctctcctgggtccattggtcccttgcactcttgctgtacctccatcacgcaaagtggtcgcaggcagctcctatggccgagggaggtggccagaaccaccacgaggtggtgaagttcatggatgtgtaccaaaggtcttactgtcatcccattgagactcttgtggacatattccaagagtacccagatgagattgagtatatctttaaaccctcatgtgtgcctctgatgcgctgcggagggtgttgtaatgacgaggggttggaatgcgtgcccaccgaagaatcgaacattaccatgcaaatcatgcgcattaagcctcatcagggtcaacatattggagagatgtcctttctgcagcacaacaagtgtgaatgcagacctaaaaaggatcgagcaagacaggaaaacccctgcggtccatgttcggaacggcgcaagcatctgtttgtccaagatccgcagacctgtaagtgctcctgtaagaacaccgatagcagatgcaaagcacgacagcttgagctgaacgaacgaacttgccggtgtgataagcccaggcga

SEQ ID NO: 20909 - DNA, 573 bp, synthetic construct
  misc_feature 1..573: note = source = /note="Description of Artificial Sequence: Synthetic coding sequence"
  source 1..573: mol_type = other DNA
atgaactttcttctctcctgggtccattggtccttggcgctgcttctctacctccatcacgcaaagtggtcgcaggccgctcctatggccgaagggggaggacagaatcatcatgaagtggtgaagtttatggatgtctaccaaagatcctactgtcatcctattgagactctggtcgacatatttcaggagtacccagatgagatcgaatacatctttaagccaagctgtgtgcccctcatgcgatgcggtggctgctgcaatgatgagggtttggaatgcgttcctaccgaagaatcgaacattactatgcaaatcatgcgcatcaagccacatcagggccaacatattggagaaatgtcctttcttcaacacaacaaatgtgagtgtagacctaagaaagatcgggcccggcaagaaaatccctgtggtccttgttcagagcggagaaagcaccttttcgtgcaggaccctcaaacgtgtaagtgctcgtgcaagaacaccgacagcagatgtaaggcgaggcaactggagctcaacgaacggacttgtagatgcgataagccaagaaga

SEQ ID NO: 20910 - DNA, 573 bp, synthetic construct
  misc_feature 1..573: note = source = /note="Description of Artificial Sequence: Synthetic coding sequence"
  source 1..573: mol_type = other DNA
atgaactttctgttgtcttgggtgcactggtctctcgcgctgctgctctatttgcatcacgccaagtggtcccaggctgcgcctatggccgaaggcggtggccagaatcaccacgaggtagtgaagtttatggatgtctatcaaaggtcttattgtcatcctatcgagaccctggttgatatcttccaggaatacccggatgagattgagtacatattcaagccctcctgcgttcccctgatgagatgtggaggctgctgcaacgatgagggcctcgagtgcgtaccaactgaggaaagtaacatcacaatgcagattatgcgcatcaagccccaccagggacagcacatcggcgaaatgtcattcctgcaacacaacaagtgcgagtgtaggcctaagaaagacagagctcgccaggaaaacccttgcggcccttgctccgagagacgcaaacatctttttgtgcaggaccctcaaacatgtaaatgctcctgtaagaacaccgactctaggtgtaaagcgagacaactggagctgaacgaacgcacgtgtcgctgtgacaagcctaggcgc

SEQ ID NO: 20911 - DNA, 573 bp, synthetic construct
  misc_feature 1..573: note = source = /note="Description of Artificial Sequence: Synthetic coding sequence"
  source 1..573: mol_type = other DNA
atgaactttctgttaagttgggtgcactggagcttggcactgcttctctatctgcatcacgctaagtggtcacaggcggctccaatggctgagggaggagggcagaaccatcatgaggttgtcaagttcatggacgtatatcagcgctcatactgtcatcctatcgaaacgctggtcgatatttttcaagaatatccagacgaaatcgaatacatatttaagccaagctgtgtgccgctgatgcgctgtggaggctgctgtaacgacgagggcctcgagtgcgtgccaaccgaggagtccaatatcaccatgcaaatcatgcgcataaagccgcaccaaggccaacacataggcgaaatgagcttccttcagcataataaatgcgaatgccggccaaaaaaagatcgggcccggcaagaaaacccatgcggaccctgtagcgagagaaggaagcacctgttcgtgcaagatcctcaaacctgtaagtgctcctgcaagaacaccgactcaaggtgcaaggccagacaattggaattgaacgaaagaacctgtagatgcgataagccgcgcaga

SEQ ID NO: 20912 - DNA, 573 bp, synthetic construct
  misc_feature 1..573: note = source = /note="Description of Artificial Sequence: Synthetic coding sequence"
  source 1..573: mol_type = other DNA
atgaatttcctgctctcctgggttcattggtccttggcccttctgctatacctgcatcacgctaagtggagccaggctgcacccatggccgaggggggcggacaaaatcaccatgaagtggtcaagttcatggatgtgtatcagcgcagttactgccatccaatcgaaacactcgtagatatctttcaggagtatcccgacgagatcgagtacatctttaagcctagctgtgtgcccttgatgcgatgtggcggttgttgtaatgatgagggccttgaatgtgtaccaaccgaagagagcaatataacaatgcaaatcatgaggatcaaaccccatcaaggccagcacattggggagatgtcctttttgcagcataataagtgcgaatgcaggcctaagaaggacagggccaggcaggagaacccctgcggcccctgctctgaacgtagaaagcatctgttcgtgcaggatccacaaacatgcaagtgctcttgtaaaaacaccgattccaggtgcaaagcaagacagctcgaattgaatgagcggacatgccgttgcgacaaaccccggagg

SEQ ID NO: 20913 - DNA, 573 bp, synthetic construct
  misc_feature 1..573: note = source = /note="Description of Artificial Sequence: Synthetic coding sequence"
  source 1..573: mol_type = other DNA
atgaattttcttctctcctgggtgcattggagcctcgcactactgctgtatttgcatcacgcaaaatggagtcaggccgctcccatggcagagggcgggggacaaaatcaccatgaggtggttaaattcatggacgtttatcagcggagctactgtcatccaatcgagacgctcgtcgacatctttcaggagtatcccgatgagatcgagtacatctttaaaccctcgtgtgtgcccctgatgcggtgtggtggatgttgtaacgacgaggggttggaatgcgtgccaaccgaggaatctaatatcacgatgcagattatgcgcatcaaacctcaccaggggcagcacatcggcgagatgtcctttcttcaacacaataagtgtgagtgccggccgaagaaggaccgcgcccgccaggagaatccctgcggaccatgttctgagaggaggaagcatctattcgtgcaggatccgcaaacctgcaaatgtagctgcaaaaacacagactcgcgatgcaaagcgagacaattggaactaaacgagcgcacttgtcgctgcgacaaaccccgtcgg

SEQ ID NO: 20914 - DNA, 573 bp, synthetic construct
  misc_feature 1..573: note = source = /note="Description of Artificial Sequence: Synthetic coding sequence"
  source 1..573: mol_type = other DNA
atgaatttccttctgagttgggtccattggtcactggctttgctcttgtatcttcatcatgccaaatggagtcaagccgccccaatggctgagggcggtggacagaaccaccatgaagtggtgaagtttatggacgtgtatcaacggtcttattgccatcccatcgagaccctggttgatatcttccaagaatatcccgatgaaatagaatatatattcaaaccatcatgtgtgccgctcatgaggtgtgggggttgttgtaatgacgagggcctggagtgcgtccccacagaagagtccaacatcactatgcagatcatgcggatcaaaccgcaccagggtcaacatattggagagatgagctttctgcagcataacaaatgcgagtgccgtcctaaaaaagatagagcccgacaggaaaatccttgcggcccctgttctgagcgtagaaagcatctgtttgtgcaggacccccagacttgcaaatgctcatgtaagaacacagattctcgctgtaaggcgcgtcagttggaactgaatgaacggacatgtagatgcgacaaaccaagacgc

SEQ ID NO: 20915 - DNA, 573 bp, synthetic construct
  misc_feature 1..573: note = source = /note="Description of Artificial Sequence: Synthetic coding sequence"
  source 1..573: mol_type = other DNA
atgaactttctccttagctgggtgcactggagtctcgctctcttgttgtacctccaccatgccaaatggagccaggctgcgccaatggcagagggggggggccagaaccatcacgaggtggtaaagttcatggatgtgtatcagcgaagctactgccaccccatcgagactctagtagatatcttccaggaatacccagatgagatcgagtacatcttcaagccgtcttgtgtccccttgatgagatgcgggggttgttgtaacgacgagggcttggaatgcgttcccacggaggagagcaatataaccatgcaaatcatgagaataaagccgcatcagggtcaacatattggagagatgtctttcctgcaacataacaagtgcgagtgtcgccccaaaaaagatcgggcgaggcaggagaacccgtgcggaccctgttccgaaaggcggaagcacctttttgtccaggatccccagacatgcaaatgttcatgcaaaaacaccgatagtagatgtaaggccagacagctggagctcaacgagagaacctgccgttgtgacaaaccaagacgg

SEQ ID NO: 20916 - DNA, 573 bp, synthetic construct
  misc_feature 1..573: note = source = /note="Description of Artificial Sequence: Synthetic coding sequence"
  source 1..573: mol_type = other DNA
atgaacttccttctttcctgggtgcattggtctctggcacttctcctgtatctacatcacgccaagtggagccaagccgctccaatggctgaagggggcggacaaaaccaccacgaggtcgtaaagttcatggatgtctatcagcggagctattgtcaccccattgagacactggtggatattttccaggaatatcctgacgagatcgaatacatattcaagccttcttgcgtgccgttaatgcggtgtggtggatgctgcaacgatgagggactggaatgtgttcccacagaagaatccaacatcaccatgcaaattatgagaatcaagcctcatcagggtcagcacattggggagatgtccttcttacagcacaacaagtgcgagtgcaggcccaaaaaagatcgtgctcgacaggagaacccatgcggcccatgcagtgagagaaggaaacatctcttcgtgcaagatccccagacctgtaaatgctcctgcaaaaacacagatagccgatgcaaggccaggcaacttgagcttaacgaaaggacctgccgctgcgacaagccccgcaga

SEQ ID NO: 20917 - DNA, 573 bp, synthetic construct
  misc_feature 1..573: note = source = /note="Description of Artificial Sequence: Synthetic coding sequence"
  source 1..573: mol_type = other DNA
atgaatttcctcctttcctgggtccactggtctctcgcccttctcctctatttacaccacgccaaatggtcccaggccgctcctatggcagagggcggtggccagaatcatcatgaagtagttaaatttatggacgtctatcagcgtagttattgccacccgatcgagactcttgtggacatcttccaagagtatccggatgagatagagtacatctttaaacctagctgcgtaccactcatgcgatgtggaggttgttgtaacgacgaaggtttggaatgcgtacctaccgaggagagcaatatcaccatgcaaattatgcgcatcaagccccaccagggacagcatattggggaaatgtctttcttgcagcacaacaagtgtgagtgccgtccgaagaaggaccgagctcgtcaagagaatccgtgcggaccatgctcagagaggagaaagcatttgttcgtccaggatccccagacgtgcaagtgctcatgtaaaaacacggacagtcggtgcaaggcccgccagcttgagctaaacgagaggacgtgccgatgcgacaagccgcgaagg

SEQ ID NO: 20918 - DNA, 573 bp, synthetic construct
  misc_feature 1..573: note = source = /note="Description of Artificial Sequence: Synthetic coding sequence"
  source 1..573: mol_type = other DNA
atgaacttcctgctgagctgggtccattggtcactggcgctgttgctctacctgcaccatgccaagtggagccaggctgctcctatggcggagggagggggtcaaaatcatcacgaggtggtgaagtttatggacgtgtaccaaaggtcatactgccatccgattgaaaccctggtggatatctttcaagaatatcccgacgaaatcgagtacatcttcaagccgtcgtgcgtgcctctgatgaggtgcggcggatgctgtaacgatgaaggactcgagtgtgtgcctactgaagagtcgaatatcactatgcagatcatgcgcattaagccgcaccaaggacagcatatcggagaaatgtccttcctgcaacacaataagtgcgaatgcaggccgaagaaggacagagcacgccaagagaatccgtgcggaccttgtagcgagcggcgcaagcacctgtttgtccaggatccacagacctgcaaatgctcatgcaagaacactgattcgcggtgcaaggcacgccaactggaactcaacgaaaggacctgccggtgcgacaaaccacggcgg

SEQ ID NO: 20919 - DNA, 573 bp, synthetic construct
  misc_feature 1..573: note = source = /note="Description of Artificial Sequence: Synthetic coding sequence"
  source 1..573: mol_type = other DNA
atgaactttcttctgtcatgggtgcattggtcccttgccctgctgctgtacctgcaccacgccaagtggtcccaagcagccccaatggccgaaggaggtgggcagaaccatcatgaggtagtgaagttcatggatgtgtaccaaaggtcctattgtcaccctatagaaaccctcgtcgacatttttcaggagtacccggacgagattgaatacattttcaaaccatcatgtgtgccactgatgcggtgtggggggtgctgcaacgatgaaggtttggaatgcgtgccaactgaggaatcaaatatcactatgcaaatcatgagaattaagcctcatcaaggacaacatattggggaaatgagctttctgcagcacaacaagtgtgaatgtcgtccaaagaaagatcgggcccggcaagagaatccctgcggtccatgcagcgaaagacgaaagcatctttttgtccaagatccacagacctgtaagtgctcttgtaaaaacacggattcgaggtgcaaggcgcgccagctcgaacttaatgagaggacttgtcgctgtgacaaacctcgccgc

SEQ ID NO: 20920 - DNA, 573 bp, synthetic construct
  misc_feature 1..573: note = source = /note="Description of Artificial Sequence: Synthetic coding sequence"
  source 1..573: mol_type = other DNA
atgaatttccttctgtcgtgggtgcactggagccttgcattgcttctctacttgcaccatgcgaaatggtcccaagcggcacctatggccgaagggggagggcagaaccatcacgaagtcgtgaaattcatggacgtgtaccagcggtcttactgtcatccaattgaaaccctggtcgacatatttcaggagtacccggacgagatcgaatacatcttcaagccatcctgcgtgcctctgatgagatgcggcgggtgctgtaacgacgagggcctggagtgtgtgcccactgaagaatccaacataaccatgcagattatgcgtatcaagcctcatcagggacaacacattggagagatgagctttctccaacacaacaaatgtgaatgcaggcctaagaaagaccgagcccgtcaggagaacccttgcggtccatgctccgagcggagaaagcatctgtttgtgcaagatccacagacttgtaagtgttcgtgcaagaacaccgattcaaggtgtaaggcacgccaactggaacttaacgaaagaacttgtcggtgtgataaacctaggagg

SEQ ID NO: 20921 - DNA, 573 bp, synthetic construct
  misc_feature 1..573: note = source = /note="Description of Artificial Sequence: Synthetic coding sequence"
  source 1..573: mol_type = other DNA
atgaacttcctcctgtcgtgggtgcactggagcctggcattgctgctgtacctccatcacgcaaagtggtcgcaggccgcgccgatggccgaaggaggcggacagaatcaccatgaagtggtgaagttcatggatgtctaccaacggagctactgccacccgatagagactctcgtggatatctttcaagagtacccagatgagatcgaatacattttcaagccgtcgtgtgtgccgcttatgcgctgcgggggctgctgtaacgatgagggtctggaatgcgtgccgaccgaggaatccaatatcactatgcaaatcatgcggatcaaaccgcatcaaggacagcacatcggagaaatgagctttcttcagcacaataagtgcgaatgtcgcccaaagaaagatcgcgccagacaagaaaacccctgcggcccgtgctcagaaagacggaagcacctgttcgtccaagacccacaaacttgcaagtgttcgtgcaaaaacaccgactccagatgcaaagcacgccagcttgaattgaacgagcgaacctgtagatgcgacaaaccacgcaga

SEQ ID NO: 20922 - DNA, 573 bp, synthetic construct
  misc_feature 1..573: note = source = /note="Description of Artificial Sequence: Synthetic coding sequence"
  source 1..573: mol_type = other DNA
atgaattttctccttagctgggtgcattggagtctagctctgcttttgtaccttcaccatgcaaaatggtctcaggcagcccccatggccgagggcgggggacagaatcaccacgaggttgtgaagtttatggatgtttaccagcgcagttactgtcatcccatagagacactggtcgatatctttcaagagtatccagacgagatcgagtacatcttcaaaccgtcctgcgtgccattgatgcgttgtggaggatgctgtaacgacgaagggctggagtgcgtgcctaccgaagaatcaaatatcactatgcaaattatgcggattaaacctcaccaaggacaacatattggcgaaatgtccttcctgcagcataacaagtgtgagtgtagaccaaaaaaggatagggcaagacaagagaatccatgcggtccatgcagcgaaaggagaaagcatttattcgtccaggaccctcaaacctgcaaatgctcatgtaagaataccgacagccgctgcaaggcgagacagcttgagctcaacgagagaacctgtcgctgcgacaaacctcgccgg

SEQ ID NO: 20923 - DNA, 573 bp, synthetic construct
  misc_feature 1..573: note = source = /note="Description of Artificial Sequence: Synthetic coding sequence"
  source 1..573: mol_type = other DNA
atgaattttctcctgtcctgggtacattggtctctggcacttttgttatatcttcatcacgctaaatggagtcaggccgctcccatggctgaagggggagggcagaaccatcatgaagtagtgaaattcatggatgtgtaccagaggtcatactgtcatcctatcgaaactctggtagatatcttccaggaatatcctgacgaaatcgagtatatattcaagcccagttgtgtgccactgatgcggtgcggagggtgttgcaatgatgaggggctggagtgcgtgcctacagaagagagtaacataacaatgcagatcatgagaattaaaccccatcagggacagcatataggggagatgtcttttctgcagcacaacaagtgtgaatgcagaccaaaaaaggatagagcaaggcaggagaacccttgtggaccttgctcagaaagaaggaaacatctttttgtgcaggatccacagacttgtaaatgtagttgcaaaaacactgatagtcggtgcaaggctcgacagctcgagctcaacgaacggacgtgcagatgcgataaacccagaagg

SEQ ID NO: 20924 - DNA, 573 bp, synthetic construct
  misc_feature 1..573: note = source = /note="Description of Artificial Sequence: Synthetic coding sequence"
  source 1..573: mol_type = other DNA
atgaactttctcctctcatgggtccattggtcgctcgcactgctgttgtacctgcatcatgcaaagtggtcgcaagcggcgcccatggctgaagggggcggacagaatcatcacgaagtcgtgaagttcatggatgtctatcagagatcgtactgtcatcctattgaaactcttgtggacatatttcaagaataccccgacgaaatcgagtacatcttcaagccctcatgcgtccctcttatgcgatgcggcggttgttgcaacgatgagggtctggaatgcgttccaaccgaggaatcgaatatcacgatgcagattatgcgcatcaaaccgcatcaggggcaacacattggagaaatgtcctttctgcaacataacaagtgtgaatgcagaccaaagaaagatagggcgagacaagaaaacccttgcggaccttgtagcgaacggcggaagcatctttttgtccaggacccccaaacctgtaagtgctcctgcaagaacaccgactccagatgcaaagcgcggcagctcgaactcaacgagagaacgtgtcgttgtgataaacctagaagg

SEQ ID NO: 20925 - DNA, 573 bp, synthetic construct
  misc_feature 1..573: note = source = /note="Description of Artificial Sequence: Synthetic coding sequence"
  source 1..573: mol_type = other DNA
atgaacttcttgctctcctgggtgcactggtcattagccttgcttctgtaccttcatcatgccaagtggtctcaggctgctccaatggccgaaggtgggggacagaaccaccacgaagtagttaaattcatggacgtctatcagagaagttactgccacccaatcgagacacttgtagatatatttcaggaatacccagatgaaatcgaatatatctttaaaccctcttgtgtgcccttgatgaggtgtggagggtgctgcaatgatgagggactggagtgtgtgcccaccgaggaaagcaatattacaatgcagatcatgcggatcaaaccccatcagggtcaacatataggagaaatgtcattcctgcaacacaataaatgcgaatgtaggcctaagaaggatcgcgcgaggcaagaaaatccttgcggcccttgctccgagcggaggaagcacctctttgtgcaggacccccaaacatgcaagtgctcctgcaaaaataccgactctcggtgtaaggcgaggcagctggaactcaacgagaggacatgtaggtgtgataagccccgcagg

SEQ ID NO: 20926 - DNA, 573 bp, synthetic construct
  misc_feature 1..573: note = source = /note="Description of Artificial Sequence: Synthetic coding sequence"
  source 1..573: mol_type = other DNA
atgaacttcctcttgagttgggtgcactggagtttggcattgctcctatatcttcaccatgctaagtggtcccaggctgcaccaatggccgagggagggggacagaaccatcacgaggttgtaaagttcatggatgtgtaccagaggtcatattgccaccctattgaaaccctggtcgatatctttcaggagtatcccgatgaaatcgagtatatcttcaagccttcatgcgtgcctctgatgaggtgtggcggatgttgcaacgacgagggactggaatgcgtgcccactgaggaaagtaacattaccatgcagattatgagaatcaaaccccatcaagggcagcacataggagagatgtcattcctccagcataataagtgcgaatgcagaccaaaaaaagatagagctcgccaagagaacccatgtggcccatgtagcgaacggcgtaaacatctttttgtgcaggatccacagacctgcaagtgctcctgcaaaaatactgactcaagatgcaaggcacgccagctggaactgaatgaacggacatgtcgatgcgacaaacctagacgc

SEQ ID NO: 20927 - DNA, 573 bp, synthetic construct
  misc_feature 1..573: note = source = /note="Description of Artificial Sequence: Synthetic coding sequence"
  source 1..573: mol_type = other DNA
atgaattttcttttaagttgggttcattggtcccttgcattattattatatttacaccatgctaaatggagtcaagctgcaccaatggcagaagggggtggacaaaatcatcatgaagttgtaaaatttatggatgtttatcaaagatcatattgtcatccaatcgaaactttagtagatattttccaagaatatccagatgaaattgaatatatattcaaaccttcttgtgtaccattaatgagatgcggaggatgttgcaatgatgaaggattagaatgtgttccaacagaagaatctaatattacaatgcaaattatgagaattaaaccacatcaaggacaacacatcggagaaatgtcattccttcaacataataagtgtgaatgtcgtccaaagaaggatagagcaagacaagaaaacccatgtggtccatgttcagagcgtagaaaacatctttttgtacaagatcctcaaacatgtaaatgttcgtgtaaaaatacagattctcgttgtaaggctagacaattagaattaaatgaaagaacatgtagatgtgataaaccaagaaga

SEQ ID NO: 20928 - DNA, 573 bp, synthetic construct
  misc_feature 1..573: note = source = /note="Description of Artificial Sequence: Synthetic coding sequence"
  source 1..573: mol_type = other DNA
atgaacttcttgctgtcctgggtgcactggtccctggcactgcttctctacctgcaccacgctaagtggtcgcaggcagccccgatggcggagggcggaggtcagaaccaccatgaagtggtaaagtttatggatgtgtaccagcgctcgtactgccacccaatcgaaaccctggtggacatcttccaagagtaccctgacgagatcgaatacatcttcaaaccgtcgtgtgtgcctttgatgagatgtggaggatgctgcaatgatgaaggactggagtgtgtgcccactgaagagtcgaacattactatgcaaatcatgagaattaagccgcaccagggacaacatatcggcgagatgtcattcctccaacacaacaaatgcgaatgtaggccaaagaaagatagagccaggcaggaaaatccgtgcggtccatgctccgagcgccggaagcatctgtttgtgcaggatccgcagacgtgcaagtgctcgtgcaagaatactgactcccgctgtaaagcgagacagctggagctgaacgaacgcacctgtaggtgcgacaaacccaggcgc

SEQ ID NO: 20929 - DNA, 573 bp, synthetic construct
  misc_feature 1..573: note = source = /note="Description of Artificial Sequence: Synthetic coding sequence"
  source 1..573: mol_type = other DNA
atgaacttcctgctgtcatgggtgcactggtcgctcgcactcctgctgtacctccaccacgctaaatggagccaagccgcaccaatggccgaagggggaggccagaatcaccatgaagtggtcaagttcatggacgtgtatcaacgctcgtactgtcaccctatcgagactctggtggatatcttccaagaataccctgatgaaattgagtacatcttcaaaccgtcctgcgtgcctctgatgagatgcggggggtgttgtaacgacgagggactggaatgcgtgcctacggaagagtccaatatcactatgcaaatcatgcgcatcaaacctcatcagggccaacatatcggcgaaatgagcttcctgcagcacaacaagtgcgaatgtcgccccaagaaggacagggccaggcaggagaacccgtgtggcccgtgctctgagcggcgcaaacatctgtttgtccaagatccacaaacttgtaagtgcagctgcaaaaacaccgactcgcgctgcaaggcgaggcagctcgaactgaacgaaaggacttgccgatgtgacaagccccggcgc

SEQ ID NO: 20930 - DNA, 573 bp, synthetic construct
  misc_feature 1..573: note = source = /note="Description of Artificial Sequence: Synthetic coding sequence"
  source 1..573: mol_type = other DNA
atgaactttctcctaagctgggtgcactggtcattggctctgctactgtatttgcatcatgctaaatggagccaggctgcacctatggcagagggcgggggccagaatcaccatgaggtggttaaatttatggatgtctaccaacggagttactgtcaccccatcgagacgcttgttgatatattccaggagtacccagacgagatagaatacatctttaaaccttcatgcgtgcccctgatgcgatgtggggggtgttgcaacgacgaaggtttggagtgcgtccccacagaagagtcaaacatcaccatgcagatcatgcgcatcaagcctcatcaaggccagcacataggcgaaatgtcctttttacaacataataagtgcgagtgccggcccaagaaggacagggcgcgacaggagaacccatgcggcccctgcagtgagcggcggaaacatctgtttgtgcaagatcctcaaacatgtaagtgctcttgtaagaacacagactcccgatgcaaggccaggcagctcgaactcaacgagcgtacctgtcgatgtgacaagccccgcagg

SEQ ID NO: 20931 - DNA, 573 bp, synthetic construct
  misc_feature 1..573: note = source = /note="Description of Artificial Sequence: Synthetic coding sequence"
  source 1..573: mol_type = other DNA
atgaatttccttctcagttgggtccattggtccctggctctcctcttgtaccttcaccatgcaaaatggagccaagcggctcctatggctgaaggcggcggccaaaaccatcacgaagtagttaaattcatggacgtttaccagaggtcttattgccaccccattgagacattagtggatattttccaagaataccctgacgagatcgaatatatctttaagcctagctgcgtgccgctcatgagatgtgggggctgctgtaacgacgaaggcctggaatgcgtgcccacagaggaaagtaatatcaccatgcagattatgcgaattaagcctcaccagggccaacatattggtgaaatgtcatttctacagcacaacaaatgcgagtgtcgcccaaagaaggaccgggcccgccaagagaacccctgcggaccttgctctgaacgccgaaagcatctgttcgtgcaggatccccagacatgcaaatgttcatgcaagaataccgactctagatgcaaagcgcgccaattggagttaaatgaacgtacttgcaggtgtgacaaaccccgtagg

SEQ ID NO: 20932 - DNA, 573 bp, synthetic construct
  misc_feature 1..573: note = source = /note="Description of Artificial Sequence: Synthetic coding sequence"
  source 1..573: mol_type = other DNA
atgaatttcctgctgagctgggtccactggagtttggctttactgctgtatttgcatcatgccaagtggtcccaggccgccccaatggcggagggaggaggacaaaaccaccatgaggtggtgaagtttatggatgtgtaccaacgatcttattgtcatcccatcgaaacactcgtggatatctttcaggaatatccggatgagatcgagtacatatttaagccatcctgtgttcctctaatgaggtgtggggggtgctgtaatgacgagggtttggaatgcgtccctactgaggaaagcaatatcacaatgcagattatgagaataaagcctcaccaaggccagcatattggcgaaatgtctttcctacagcacaataagtgcgaatgccgtcctaaaaaagatcgcgcccggcaggagaacccgtgcgggccctgctcagaacgccgcaagcatctgttcgtgcaggaccctcagacatgcaagtgctcctgcaaaaatacggattcccgatgcaaagctaggcagttggagctgaacgaaagaacgtgcagatgtgataagccaagacgg

SEQ ID NO: 20933 - DNA, 1260 bp, synthetic construct
  misc_feature 1..1260: note = source = /note="Description of Artificial Sequence: Synthetic coding sequence"
  source 1..1260: mol_type = other DNA
atgcacctgcttggatttttctccgtggcctgctcgctcttggcggcagcacttcttccaggaccaagggaagcgccagcagcagccgctgcttttgaatccggactcgatcttagcgacgcagaacctgatgcaggtgaagccactgcatacgcctctaaagacctggaagaacaactgcgctccgtctcgagcgtcgatgaactgatgaccgtgctgtaccctgaatattggaagatgtacaagtgtcaactgcgcaaggggggttggcagcataatagagaacaggccaatctgaactcacgcactgaagaaaccatcaagtttgctgccgcacattacaacactgagatactgaaaagcatcgacaacgaatggagaaagacccaatgcatgcctagggaagtgtgcattgatgtcggcaaagagttcggtgtggcaaccaacacgttctttaagccgccctgtgtgtccgtgtatcggtgtgggggctgttgtaactccgaaggacttcaatgtatgaacaccagcacctcgtacctgagcaagaccctttttgaaatcaccgtgcctctgtcccaagggccgaagccggtcacgatttcatttgccaaccacacttcgtgtagatgtatgtccaagctcgatgtgtacaggcaggtgcattctattatccgtaggtcgcttcctgccactttgccccagtgccaagcggccaacaagacctgtccgaccaattacatgtggaacaaccatatctgtagatgtctggcgcaggaggacttcatgttttcgtcagatgcgggagatgattccactgacggctttcacgatatttgtggcccaaacaaagaattggacgaggaaacctgccaatgcgtctgccgcgcaggacttcgacctgcaagctgcgggcctcataaggagctggatcgaaattcctgtcaatgtgtgtgcaagaacaagctctttccttcgcaatgtggagcaaatcgggagtttgacgaaaacacttgccaatgtgtgtgtaaaagaacttgtccgcgtaatcagccacttaatccgggtaagtgtgcctgtgaatgcactgaaagcccacaaaaatgccttctgaaggggaagaagttccaccatcaaacgtgttcctgttaccgtaggccttgtacgaaccgacagaaggcatgcgaaccaggattctcgtacagcgaagaggtgtgtcgctgtgtgccttcctattggaagcgtccacagatgatgagc

SEQ ID NO: 20934 - DNA, 1260 bp, synthetic construct
  misc_feature 1..1260: note = source = /note="Description of Artificial Sequence: Synthetic coding sequence"
  source 1..1260: mol_type = other DNA
atgcatctccttggctttttcagtgtggcgtgttctttgcttgcagcagccctgctgcccggccctagagaagcaccagctgcagcagcagcgtttgaatccggcctggacctgtcggatgcggagccagatgcaggagaggcgaccgcctacgcttcaaaggatctggaagagcagctgaggagcgtgagctcggtcgatgaactgatgaccgtgctttaccctgaatactggaaaatgtacaagtgtcagcttaggaagggaggttggcagcataacagagagcaagctaaccttaacagcagaaccgaagaaacgataaagtttgcagcggcgcattacaataccgaaattctgaagtcgatcgataacgagtggcgtaagacccagtgtatgccccgcgaagtgtgcattgatgttgggaaggagtttggggtcgcaactaataccttcttcaagccaccttgcgtgtcagtctaccgctgcggaggatgctgtaactccgaaggacttcagtgtatgaacaccagcaccagctacttgagcaagaccctgtttgaaatcaccgtccctctttcacagggtcctaaaccagtcactattagcttcgcaaaccatactagctgcagatgtatgtccaagctggatgtgtaccgccaagtgcactcgattatcaggaggtcgctgccggcaaccctgcctcagtgtcaggcagcaaataagacctgtcccactaactatatgtggaataatcatatctgtagatgtctggcgcaggaggactttatgttctcaagcgacgctggggatgatagcactgacggttttcatgacatttgtggacccaataaggagcttgacgaggaaacttgtcaatgtgtgtgtcgcgctggtcttagacccgccagctgcggacctcataaggaattggatagaaattcctgccaatgcgtgtgcaagaataaacttttcccatcacaatgtggagcgaatagggagttcgatgagaacacctgtcaatgtgtttgtaaaagaacttgtccacgcaaccagccactgaaccctgggaagtgtgcctgtgagtgtaccgaatcgccacaaaagtgtctcctgaaaggaaagaagttccatcaccagacttgttcctgttacaggcggccatgtactaacagacaaaaagcatgtgaaccaggtttttcctactctgaagaagtgtgtcggtgcgtgccatcatattggaaaagaccccagatgatgtcc

SEQ ID NO: 20935 - DNA, 1260 bp, synthetic construct
  misc_feature 1..1260: note = source = /note="Description of Artificial Sequence: Synthetic coding sequence"
  source 1..1260: mol_type = other DNA
atgcatctgctcggattcttttctgtggcttgctcacttctcgcagctgcactgctgcccggaccaagagaagccccagccgccgccgcggccttcgaaagtgggctcgatctctccgatgcagagcccgatgctggagaagccacagcctatgcctccaaagatctcgaagaacagctccggagtgtgtcttctgtggatgaacttatgacagttctatatccagaatattggaaaatgtataaatgccagcttagaaagggggggtggcagcataaccgggaacaggcaaatttaaactctcgaacagaagaaacaataaaatttgctgcagcccactataatactgaaattcttaagagtattgataatgaatggagaaaaactcaatgtatgccacgggaagtttgcatagatgttgggaaagaatttggggtggccactaacacatttttcaaacccccttgtgtatcagtgtatagatgcggaggatgctgcaattccgaagggctgcaatgtatgaatacatcaacttcttacctatcaaagacactgtttgaaataactgttcctctgagtcaggggccaaaacccgtgacaatctcttttgccaatcacactagttgtagatgtatgtccaaattagatgtttatcggcaggttcactcgataattcgacgctccttacccgccactctccctcagtgtcaagccgccaataagacatgtcccacaaactatatgtggaataaccatatatgtcggtgcctagcccaggaggatttcatgttcagtagtgatgctggagatgatagtacagacgggtttcacgatatctgcggaccaaataaggaacttgatgaagaaacttgtcagtgtgtctgcagggctgggctccggcccgcgtcatgtgggccccataaagaactcgacagaaattcatgccagtgtgtttgtaagaataaactgtttccttcccagtgcggagctaaccgcgaattcgatgagaacacttgccaatgtgtctgtaagcgcacttgtcctcgcaatcagcccttaaatcctggaaaatgtgcttgtgaatgtacagagtcaccccagaagtgtcttctcaaaggaaaaaaattccaccatcaaacttgctcttgttaccggaggccttgtacaaatagacagaaggcctgcgaacctggattctcttattcagaagaagtctgtaggtgcgtgccttcttattggaaaagacctcagatgatgagt

SEQ ID NO: 20936 - DNA, 1260 bp, synthetic construct
  misc_feature 1..1260: note = source = /note="Description of Artificial Sequence: Synthetic coding sequence"
  source 1..1260: mol_type = other DNA
atgcatctgctgggattcttctctgtcgcctgttcgctgctagcagctgccctgttacccggtcccagagaggctcctgctgccgctgccgcatttgagtcggggttggacttgtctgacgccgaaccagatgcaggcgaggccaccgcatacgctagcaaggatctcgaagaacagctgaggagtgtatctagcgtcgatgagttaatgaccgtactgtacccggagtattggaaaatgtataaatgccaactgcgaaagggagggtggcagcacaatcgggagcaggcaaatctgaatagccgcacagaggagactataaaatttgccgccgcacattataacacagaaatcctaaaaagcatcgacaatgaatggaggaagacccaatgcatgcctcgagaggtttgcattgacgtaggcaaagagttcggggtcgctaccaatacctttttcaagcctccgtgcgtctctgtgtaccgctgtggtggatgctgtaattctgaggggcttcagtgcatgaacacaagcacgagctacctgtctaagaccctatttgaaattaccgtcccattaagccagggacccaagcccgtcactatctccttcgcaaaccacacatcctgccgttgcatgtctaagttggatgtctacaggcaagtgcacagcatcatcagacgttccctgcctgctacgttaccacagtgtcaggctgctaacaaaacctgtccaaccaactacatgtggaacaaccatatctgcagatgcctggctcaagaagattttatgtttagttctgacgctggggatgactccactgatggatttcacgatatttgcggcccgaacaaagaactggatgaggagacttgccagtgcgtatgtcgggcgggtctgaggcccgcctcttgcgggcctcataaggagctagacagaaacagttgtcaatgtgtatgcaaaaacaaactgtttcctagccagtgcggcgctaacagagagttcgacgagaacacttgccaatgcgtttgtaagaggacctgtccccgtaatcagcctctaaaccccgggaaatgcgcatgcgagtgcaccgagtctccacagaaatgcctgctgaagggaaaaaagttccaccaccaaacatgctcctgttataggcgcccttgcaccaataggcagaaggcatgtgaacccgggtttagttacagcgaggaggtgtgtcggtgcgtgcccagttattggaagagaccgcaaatgatgtct

SEQ ID NO: 20937 - DNA, 1260 bp, synthetic construct
  misc_feature 1..1260: note = source = /note="Description of Artificial Sequence: Synthetic coding sequence"
  source 1..1260: mol_type = other DNA
atgcatctcctgggcttctttagcgtggcatgctcactccttgcagcagcccttctgccaggacccagagaagctcccgcggccgcagccgcatttgaatcgggattggatctctctgatgcagagccagatgcgggcgaagcaactgcctacgcgtccaaggacttggaagagcaacttaggagcgtctcttcagtcgatgaactgatgactgtgttgtatcctgaatactggaagatgtataagtgccaactccgtaagggcgggtggcagcacaaccgggaacaggcgaatctcaattcccgcaccgaagaaactattaagtttgcagcagcacactataacaccgagatacttaagtcgattgacaacgaatggcgaaagactcaatgtatgccaagagaggtgtgcattgacgtgggaaaggaatttggagtggcaaccaacactttctttaagccgccctgtgtgtccgtgtaccgctgtggtggatgttgtaattccgagggactgcagtgtatgaacaccagcacctcctacctgagcaagaccctttttgagattactgtgccactttcgcagggtccaaagcccgtgaccatctcgttcgcaaatcacacctcgtgtaggtgtatgagcaagttggatgtgtaccgccaggtgcactcgatcattaggcggtccctgcctgcgactctgcctcagtgccaggcagcaaacaagacttgtccgaccaattacatgtggaacaaccatatctgtcgctgtcttgctcaagaagatttcatgttttcatccgacgcaggagatgattccaccgatggttttcacgacatttgcggccctaacaaagaacttgacgaagaaacttgccaatgcgtgtgtagagcaggcctccgcccagcctcgtgcggtccacataaagaactggatcgtaactcctgtcaatgtgtgtgcaaaaacaagttgtttccttcgcaatgtggtgctaaccgcgagttcgatgaaaacacgtgtcagtgtgtgtgtaagcggacctgtccccgcaatcaacctctgaatccaggtaaatgtgcatgtgaatgcaccgaaagccctcaaaagtgtctcctgaagggaaagaaattccaccatcaaacttgttcgtgttaccgtcgaccctgcactaaccggcaaaaggcgtgtgaacctggctttagctactccgaggaggtgtgccgctgtgtgccgagctactggaagcgaccacaaatgatgtct

SEQ ID NO: 20938 - DNA, 1260 bp, synthetic construct
  misc_feature 1..1260: note = source = /note="Description of Artificial Sequence: Synthetic coding sequence"
  source 1..1260: mol_type = other DNA
atgcacctgctcggcttttttagcgtggcttgttcacttctggccgctgcattgttgcctggcccaagagaagctcccgccgcagcagccgcatttgagtccggcctggacctgagtgacgccgaacctgatgctggagaggctaccgcctacgcaagtaaagatctcgaggagcagctcagatcagtctcctccgtcgacgaactgatgacagtgctctaccccgagtattggaagatgtacaagtgccagctgaggaaaggcggatggcagcacaatcgcgagcaggccaatctgaactcaaggacagaagagactatcaagttcgccgccgctcactacaataccgagatcttgaagtcaatcgataacgagtggcgcaagactcagtgcatgcctcgtgaggtatgcatcgacgttggtaaagagtttggtgtcgccaccaacacattcttcaagcccccctgtgtaagcgtgtatcgttgtggcggttgctgtaattccgaaggactgcaatgcatgaacactagtacttcatacctttctaaaactctgttcgaaatcaccgttcccctctcccagggcccaaaacccgtgaccatttcctttgctaatcataccagctgcaggtgtatgtctaagttggacgtctaccgtcaggtgcactcaatcataaggaggtcacttccagctactctgcctcaatgccaggctgccaataagacttgccctaccaactacatgtggaacaatcatatttgcagatgccttgcacaggaggactttatgttctcttccgatgccggtgatgactccaccgatggtttccatgatatctgtggccccaacaaagaattggacgaagagacttgtcagtgcgtctgtcgcgccggcctgcgccccgcttcatgcggcccacataaggagctggaccgtaactcatgccagtgtgtatgcaagaacaaactttttccttcacagtgcggagctaatagagagttcgatgagaatacctgccaatgtgtatgcaagcgcacctgcccaaggaatcagccactcaaccccggaaagtgtgcttgcgaatgcaccgagagtcctcaaaagtgtttgttgaaaggcaagaagttccaccatcaaacttgctcctgctaccgtcgtccctgtaccaatagacagaaggcatgcgaacctggcttttcctattccgaggaggtctgtcgctgcgtaccctcatactggaaacgccctcagatgatgtct

SEQ ID NO: 20939 - DNA, 1260 bp, synthetic construct
  misc_feature 1..1260: note = source = /note="Description of Artificial Sequence: Synthetic coding sequence"
  source 1..1260: mol_type = other DNA
atgcatctgcttggattcttttcggtcgcctgttccctcctcgccgcagcactcctccctggtcctagagaagcacctgccgcagcagccgcgtttgaatcgggtcttgatttgtccgatgcggaaccagacgcaggtgaggctacggcgtatgcctcaaaggatttggaagaacaacttaggtcggtgtcatccgtggacgagcttatgactgtgctttaccccgagtactggaagatgtacaagtgccaactgcgaaagggaggctggcaacataacagggaacaggcaaacctgaattcgagaaccgaggagactattaagtttgcagcagctcattacaataccgagattctgaagtctatcgacaacgagtggagaaaaactcagtgtatgccacgcgaggtgtgcattgatgtcggtaaagaatttggcgtggccactaacacctttttcaagcccccatgcgtgagcgtgtacagatgtggtggttgttgcaactcggaaggccttcaatgtatgaacaccagcactagctacctctcaaagactttgttcgaaatcaccgtccccctctcgcaaggacccaagcctgtgactatctcattcgctaatcatacctcgtgtagatgtatgtcgaaactggatgtgtatcgacaagtgcactccatcataaggcgaagcctgcctgccactctcccacagtgccaagctgcaaacaagacgtgtcctaccaactacatgtggaacaatcatatatgtcgctgtctcgcccaagaagatttcatgttttcctcagatgcaggagatgacagcaccgacgggtttcacgacatctgtggacctaacaaagaacttgatgaagaaacctgccaatgcgtctgtagggcaggtttgcggcccgcgagctgcggacctcacaaggagctcgatcgcaatagctgtcagtgtgtgtgtaagaataagctgtttccttcacaatgcggtgcaaatcgtgaattcgatgaaaatacttgtcaatgtgtctgtaaacggacctgtcctaggaatcagcccctgaatcccggcaagtgtgcgtgcgagtgcacggagtcgccgcagaaatgtttgcttaagggtaaaaagtttcaccatcagacctgttcatgctaccgtcggccatgcaccaaccgacagaaggcatgtgaaccgggattttcgtactcagaagaagtgtgtaggtgtgtgccttcgtactggaagcgcccacagatgatgtca

SEQ ID NO: 20940 - DNA, 1260 bp, synthetic construct
  misc_feature 1..1260: note = source = /note="Description of Artificial Sequence: Synthetic coding sequence"
  source 1..1260: mol_type = other DNA
atgcacctcctggggttcttttccgtggcttgctccttactcgccgcggccctgttgccggggcctagagaagcgcccgccgctgcggcagcattcgaatccgggctggatcttagcgatgcggagccagacgccggcgaggctactgcatatgcctcaaaggacctggaagagcagctccggagtgtgtctagcgtggatgagctgatgacagtactgtatccagaatactggaagatgtacaaatgccagttgcgaaaaggcggttggcaacacaacagagaacaggccaatctcaacagtagaaccgaagagactattaagtttgctgcagcccactataatacggaaatcctgaagtcgatagacaacgagtggagaaagacccagtgcatgccacgcgaagtttgtatcgacgtcgggaaagagtttggggtggcgaccaacacctttttcaagcctccctgtgtatcagtttaccgatgcgggggatgttgtaactcagagggtctgcagtgtatgaatactagtacatcttatttgagcaagacactgtttgagataacagtgcctctgtcccagggccccaagcccgtgactataagcttcgccaaccatacatcttgtcgctgcatgagcaagctggacgtgtaccgacaggtgcactcaatcatccgtcggagtctacctgccacgctgcctcagtgccaggctgccaacaaaacttgtccaacgaactacatgtggaacaaccatatctgcagatgtttggcccaggaggatttcatgttttcgtctgacgccggggatgattcgacagatggattccatgatatatgtggccctaataaggagctggatgaagagacctgtcagtgcgtgtgtagggctgggctcaggcctgcctcttgtgggcctcataaggagcttgaccgcaatagctgtcaatgtgtgtgtaagaataaattgtttccatcccagtgcggggccaaccgcgagttcgacgagaacacttgtcaatgtgtttgcaagaggacctgtccaaggaaccagccactaaacccaggaaaatgtgcgtgcgagtgcaccgaaagccctcagaaatgcctcctgaaaggcaagaagtttcaccatcagacgtgtagctgttaccggagaccgtgcacgaatcggcagaaagcctgcgaacccggcttctcctactcagaggaggtatgcagatgtgtgccttcttattggaagcgacctcagatgatgtca

SEQ ID NO: 20941 - DNA, 1260 bp, synthetic construct
  misc_feature 1..1260: note = source = /note="Description of Artificial Sequence: Synthetic coding sequence"
  source 1..1260: mol_type = other DNA
atgcatctcctcggctttttctcagtcgcatgttcgctgctcgctgccgccctcctgcccggcccgcgtgaagcccccgcagccgctgctgcattcgagtcggggttggatctgagcgatgcagaaccagacgcgggagaggctactgcctacgccagcaaagacctggaggaacaactccggtcggtgtcatcggtggacgagttgatgaccgtgctttacccggaatattggaagatgtacaaatgccagctgcgcaagggagggtggcaacataaccgggagcaagcgaacctcaattcgcgcactgaagagactatcaagttcgccgctgcgcattacaacacggaaatccttaaatcgatcgacaatgaatggagaaagacccaatgtatgcctagggaagtgtgcatcgacgttggcaaggagttcggcgtggctaccaacacgttctttaagccgccgtgcgtgtcggtgtatcggtgcggcgggtgttgtaacagcgaaggcctgcagtgcatgaatacgtccacttcgtatctctccaagacgctttttgaaatcaccgtgcccctgtcccagggtcctaaacctgtcacgattagctttgcaaaccacacttcatgccggtgcatgtccaagctggacgtgtacagacaggtccactccattatcaggaggagtctgccagcgactctgccgcagtgtcaagctgcgaacaaaacttgcccgactaactacatgtggaataaccatatctgccgctgcctggcgcaggaggatttcatgttcagctcggacgccggagacgattcaactgacgggttccacgatatctgcggaccgaacaaagagctcgatgaggaaacctgccaatgtgtgtgccgggccggcctccggcctgccagttgcggaccccacaaagaactggaccgcaattcgtgccaatgcgtgtgtaagaacaaactttttccgagccagtgtggtgcaaatcgcgagttcgacgaaaacacgtgccagtgtgtctgtaagcgcacgtgcccaagaaaccagccgctgaatccaggcaagtgcgcatgcgagtgcactgaatccccgcagaagtgcctccttaagggcaagaagtttcaccaccagacttgttcctgttaccggaggccgtgcactaacagacagaaggcttgcgagccgggtttcagctacagcgaggaagtgtgccggtgcgtgccaagctactggaagcggccacaaatgatgtcc

SEQ ID NO: 20942 - DNA, 1260 bp, synthetic construct
  misc_feature 1..1260: note = source = /note="Description of Artificial Sequence: Synthetic coding sequence"
  source 1..1260: mol_type = other DNA
atgcacctgctaggcttctttagcgtggcctgtagcctcctcgcagctgcgcttttgccaggaccaagagaggctcctgccgccgcggccgccttcgagagcggattggacctgtccgatgctgaaccagatgccggcgaagccacggcttacgcctcaaaagatttggaagagcagctgcgatctgtcagttccgttgatgaactgatgaccgtcctgtaccccgagtactggaaaatgtacaagtgccagctaagaaaaggcgggtggcagcacaatcgagagcaggccaacctcaactcacggaccgaggagactatcaaatttgcagccgcccattataatacagagatactcaaaagtattgacaatgaatggaggaagacccagtgtatgccaagagaggtgtgtatcgacgtgggaaaggaattcggtgtggcaaccaataccttttttaaacccccttgcgtctctgtgtatagatgtgggggatgttgtaacagtgagggtctacagtgtatgaataccagcaccagctacctttcaaagacgctgttcgaaatcaccgtaccgctgagtcagggccctaagcccgtaacgatcagtttcgcgaaccatacctcttgtcgatgtatgtctaagctggacgtttatcggcaagtacattctattatccgacggtcattgccagccacgctgcctcagtgccaggccgcaaataagacctgccctaccaactacatgtggaacaatcatatctgtagatgtctagcacaggaggactttatgttttctagtgatgcaggcgatgattcaactgacggttttcatgatatctgtggccccaacaaagaactcgacgaggagacatgccagtgtgtttgtcgtgccgggctgagacctgcttcttgcgggccgcataaagaattggatcgaaactcttgtcagtgtgtttgcaagaataaactattcccatctcagtgcggagcaaatagagagtttgatgagaatacctgccagtgtgtctgcaagcgaacctgcccccgaaaccaaccattgaaccctgggaagtgtgcctgcgagtgtactgagagtccacagaaatgtttattgaagggaaagaaatttcaccatcaaacgtgttcttgttacaggaggccttgcactaaccgacaaaaggcttgcgagcccggcttctcttattcggaggaggtctgtagatgcgttccaagctattggaagcgaccccagatgatgtca

SEQ ID NO: 20943 - DNA, 1260 bp, synthetic construct
  misc_feature 1..1260: note = source = /note="Description of Artificial Sequence: Synthetic coding sequence"
  source 1..1260: mol_type = other DNA
atgcatttactcggctttttttctgttgcctgttcacttttggcagccgctttgttgccgggcccacgtgaagcccccgccgctgccgccgcatttgaatctggcctggacctttccgatgcagaaccagatgccggggaggcaacagcctacgcgtcaaaggaccttgaggagcagcttcgaagtgtgagctctgtggacgagctcatgacggtgttgtacccagagtactggaagatgtacaagtgccagctgaggaagggcggctggcagcacaatcgcgagcaggccaacctgaattctcgaacagaggagacaatcaagttcgccgcagctcactataacactgagattctgaaatcaatagataatgagtggcggaagacacagtgtatgccccgggaagtctgtattgatgttgggaaggaatttggggttgcaaccaacaccttcttcaagcccccttgtgtatcagtgtatcgctgcggggggtgctgtaattctgagggcctgcaatgcatgaacacaagcaccagttatctaagtaagacactgtttgagattacagttccgctgtcccaaggtcctaagccagtcacgatctctttcgcaaatcacaccagctgtcgttgcatgtctaagcttgatgtttatcggcaggtgcattctatcattagacggtcacttccggcgacactcccacagtgccaggcagccaataaaacttgccctacaaactacatgtggaacaaccacatttgtcgctgtctcgctcaggaagatttcatgtttagcagcgatgccggggatgattccacagatggctttcacgacatctgcgggcccaataaggagttagacgaagagacttgccagtgtgtatgcagggccggtcttcggccagcatcctgcggcccccacaaggaactagaccggaattcatgtcagtgcgtgtgtaagaacaaactgttcccttctcagtgcggggcaaacagggaattcgacgaaaacacatgccagtgtgtctgtaagcggacctgcccccggaaccagcctctaaatccgggaaagtgcgcctgtgagtgtaccgaatctcctcagaagtgtctactaaaaggaaaaaagtttcatcaccagacttgcagttgctataggagaccctgcacaaacagacagaaggcctgtgaacctgggttctcttactccgaggaagtgtgtcgttgcgtccccagttactggaaacgaccacaaatgatgtcc

SEQ ID NO: 20944 - DNA, 1260 bp, synthetic construct
  misc_feature 1..1260: note = source = /note="Description of Artificial Sequence: Synthetic coding sequence"
  source 1..1260: mol_type = other DNA
atgcatctcttgggtttcttcagcgtcgcctgtagtctcctggcggccgcgttactcccaggtccccgggaggcgccagctgctgccgccgcattcgaatcagggctagacttaagcgacgccgagcccgatgcaggtgaagcgaccgcctatgctagcaaggacctggaagaacaactacggagcgtctcaagcgtcgacgagctcatgaccgtgctgtacccagagtattggaagatgtataaatgtcagctccggaaaggagggtggcagcacaaccgggagcaggctaatctgaatagcaggacagaagagactattaagtttgctgctgcccattacaacacggagattttaaagagtatcgacaacgaatggaggaagacccagtgtatgccgcgcgaagtgtgcatagacgtgggtaaagaatttggggtggcaacgaatacgttctttaagccaccctgcgtgtcagtgtatagatgtggaggctgctgcaatagtgaagggctgcagtgtatgaacacctcaacgagctatctctctaaaacactgttcgagataaccgtgcccctgagccagggcccaaagccagtaaccattagcttcgctaatcatacatcctgcagatgtatgtccaaactggacgtgtatcgtcaggttcactctatcattcgccgaagcctcccggccactttacctcaatgccaggccgctaataagacctgcccaacaaactatatgtggaataaccatatttgccgctgccttgcccaggaggacttcatgttttccagcgacgccggagatgacagcacagacggttttcacgacatctgtggaccaaacaaagagctggatgaagaaacctgtcagtgcgtatgtcgggctggcttgagaccggccagttgcgggccccataaggaactggataggaactcgtgccagtgtgtgtgtaagaacaagctgtttcctagccagtgcggggctaatagagaatttgacgagaacacttgccaatgcgtgtgcaaacggacatgtcctcgcaatcagcctctgaatccaggaaaatgcgcgtgtgagtgcactgaatcaccacagaaatgcctgcttaagggtaagaaattccaccatcagacatgctcctgctatagacgtccatgtacaaatcgacagaaagcatgtgagccaggattctcctactctgaggaggtgtgcagatgcgtccccagttactggaagagaccacagatgatgtca

SEQ ID NO: 20945 - DNA, 1260 bp, synthetic construct
  misc_feature 1..1260: note = source = /note="Description of Artificial Sequence: Synthetic coding sequence"
  source 1..1260: mol_type = other DNA
atgcacttgcttggattcttttctgtggcgtgttccttgctggcagcagccctgctgcccggaccccgagaggccccagcggccgccgccgcatttgaatccgggctggacctctctgatgcagagcctgacgctggggaggccactgcatatgcctccaaagacctggaggaacagcttcgatctgtgagttcagtcgacgaactgatgacagttctgtacccagagtactggaagatgtacaagtgccagctcagaaaggggggctggcaacataaccgagagcaggctaacttgaacagtaggactgaggagacaatcaagttcgctgccgcccattacaatactgaaatactgaaatcaatcgacaatgaatggcgcaaaacccagtgcatgccccgtgaggtgtgtatcgacgtaggtaaggagttcggagtagctacgaatacattttttaagcccccttgtgtaagcgtgtaccggtgcgggggttgctgtaactccgagggcctgcagtgtatgaacacctccacttcctatctgtcaaaaaccctcttcgagatcactgtgccgctctcccagggcccgaagccggtgaccatcagttttgctaaccacacgtcctgccgctgcatgtcaaagctggatgtgtatcggcaggtccactctattatacgtcgatccttaccagcgacactgcctcaatgtcaggcggccaacaaaacatgccccacgaactacatgtggaataatcatatctgtaggtgtctagctcaggaggactttatgttctccagcgatgctggggatgattccaccgacgggttccacgatatctgtgggccaaacaaggaactggacgaggagacgtgccaatgtgtctgtcgtgctggactccgcccagccagttgcggaccacacaaagaactggatcgaaattcatgccagtgtgtgtgcaagaacaagctatttccctcccagtgcggcgccaacagagagttcgatgaaaatacttgtcaatgtgtgtgtaaaaggacatgcccccgcaaccagccactgaaccctgggaagtgcgcttgcgaatgcaccgaatccccccagaagtgtttgctgaaagggaagaaatttcaccaccagacatgttcatgctaccggaggccatgcactaatcgccaaaaggcttgtgagccaggctttagttattccgaggaagtatgtaggtgtgtacctagctactggaaaaggcctcagatgatgagt

SEQ ID NO: 20946 - DNA, 1260 bp, synthetic construct
  misc_feature 1..1260: note = source = /note="Description of Artificial Sequence: Synthetic coding sequence"
  source 1..1260: mol_type = other DNA
atgcacctgctaggttttttcagcgtcgcctgcagccttctcgccgctgccctcctgcccgggcctcgagaggccccagccgctgccgccgcgttcgagagcggactggacttatcagacgccgaaccagacgctggcgaagccacagcatacgccagcaaggacctggaggaacagctgagaagtgtgtcatccgtcgacgaattgatgaccgttctgtatcccgagtactggaaaatgtacaagtgccagcttcggaagggcgggtggcagcacaaccgggaacaggctaatctgaatagccgaaccgaagagacaattaaattcgctgcggcccactacaataccgagattctcaaatcaattgataatgagtggaggaaaactcagtgtatgccacgagaggtgtgtatcgacgtgggaaaggagttcggcgtggctactaatacattttttaagcctccgtgtgtatcagtgtaccgctgcgggggatgctgcaattccgaaggcctgcaatgcatgaatacttcaaccagttatctttcaaagacgctgttcgaaatcacagtgcctcttagtcagggaccgaagccagtcactatcagtttcgctaatcacacgagctgtcgctgcatgtccaaactggatgtttataggcaagtgcattctatcataaggagaagtctgccagcgacactcccgcagtgccaggccgcaaacaaaacttgccctaccaattacatgtggaacaaccatatctgtcgctgcctcgcccaggaagatttcatgttcagttcagatgccggtgacgactccaccgacggcttccatgacatttgtggccccaataaggagctcgatgaggagacatgccagtgtgtgtgtcgggcaggcctcagacccgcgagctgcgggccccacaaagaactcgaccgtaatagctgccagtgtgtgtgcaagaataaattgttcccatcccaatgcggcgccaatagagagtttgacgagaatacatgccaatgcgtctgcaagaggacttgcccccggaatcagcctctgaatccaggcaagtgcgcctgtgagtgtaccgagtctccacaaaagtgtctactgaaaggcaagaagttccatcatcagacctgctcctgctatcggagaccctgtacaaacaggcagaaagcatgtgaacccggcttctcttatagcgaagaagtgtgtagatgtgtgccctcttattggaaacggccgcagatgatgagt

SEQ ID NO: 20947 - DNA, 1260 bp, synthetic construct
  misc_feature 1..1260: note = source = /note="Description of Artificial Sequence: Synthetic coding sequence"
  source 1..1260: mol_type = other DNA
atgcacctgctgggcttcttttcggttgcttgctccctgcttgccgccgccttgctccccgggccacgggaagcccctgcggcggccgctgccttcgaatcgggactcgatctctcggacgctgaaccagacgcaggagaagcgactgcctacgcttcgaaagatctcgaagagcagctccgctccgtctcctccgtcgatgaactgatgactgtcctttacccggaatactggaaaatgtataagtgtcaactgagaaagggcgggtggcagcataaccgcgagcaagccaatcttaattcgagaaccgaagagactatcaagttcgcagccgcccattacaataccgaaatcctgaagtctattgacaacgaatggcgcaaaacccaatgcatgcctcgcgaggtgtgcatcgacgtcggaaaggaatttggggtggccaccaacaccttctttaagcccccatgtgtgtcagtctaccgttgcggaggatgctgcaattcggagggactgcagtgcatgaatacctctacctcttacctgtccaagaccctgtttgagatcaccgtgcccctgagtcagggaccgaagccggtcacgatctcgttcgcaaaccatacttcgtgccgctgcatgtcgaaactcgatgtgtatcgccaggtccattcaatcatccgccgctcgctgccggcgaccctgccacaatgccaagcagcgaacaaaacttgccctaccaattacatgtggaacaaccatatctgcagatgcctggcacaagaagatttcatgttctccagcgatgcgggtgatgactccacggatggattccacgacatctgcggccctaacaaagagttggacgaggaaacctgtcaatgcgtgtgtcgggctggcttgcgaccagcgtcatgcggaccgcacaaggaactggatcgcaactcgtgccaatgtgtgtgtaagaacaagctgtttccgtcccaatgcggagccaatagagaattcgatgagaacacttgccagtgcgtgtgtaagaggacctgtccgcggaaccaacctctgaatccaggaaagtgcgcctgcgagtgcactgagtcaccgcagaagtgccttttgaaaggaaaaaagttccaccatcagacctgctcctgctaccgccgcccatgtactaacaggcaaaaggcttgtgagcctggattcagctacagcgaggaggtgtgcagatgcgtcccttcctactggaaacgccctcaaatgatgtcg

SEQ ID NO: 20948 - DNA, 1260 bp, synthetic construct
  misc_feature 1..1260: note = source = /note="Description of Artificial Sequence: Synthetic coding sequence"
  source 1..1260: mol_type = other DNA
atgcacttattaggatttttttcagtcgcctgttcactcttggccgctgcactgctgcccggaccgagagaagccccagccgctgctgctgcctttgagtccggactagacctgtctgatgcagagcctgatgccggggaagcgactgcttacgctagcaaagatcttgaggagcagctccggtccgtaagttctgtcgacgaattaatgacggtgctgtacccagagtattggaaaatgtacaaatgccagctgcgaaagggtggttggcagcacaaccgggaacaagctaaccttaatagccgtaccgaggaaacgatcaagtttgcagctgcccactacaatacagagattctcaagtccatagacaatgaatggagaaaaacccagtgcatgccacgtgaggtgtgcattgacgttggcaaggagtttggagtcgctaccaacacctttttcaaacccccctgcgttagcgtctacaggtgcggcggatgttgcaacagcgagggcttacaatgcatgaacacgtccacttcctacctgtctaagactttattcgagatcacagtgcctttgtcgcaaggaccgaagccagtaacaatcagtttcgccaaccatactagctgcaggtgtatgagcaagctggacgtctataggcaggtgcactctatcatccgtaggtcactacccgcgacattgcctcagtgccaggcggcgaacaaaacgtgtccaaccaattacatgtggaataaccacatttgccggtgcctggctcaggaagactttatgttctcgagcgatgccggcgacgattctacagatggatttcacgacatctgtggcccaaacaaagaattggacgaagaaacctgccagtgtgtttgtcgagccggtctacgcccagcctcgtgcgggccccacaaggagttggatagaaactcatgccagtgtgtctgcaagaataagctattcccctcccagtgcggggcgaacagggagtttgacgagaacacctgtcagtgtgtctgcaaaaggacttgcccccggaaccagccactgaaccccggcaaatgtgcctgtgaatgtacggagtctccacaaaaatgtctgcttaaaggtaagaaatttcatcaccagacctgttcctgttatcgtcgaccttgcaccaataggcagaaggcttgtgaaccgggtttttcttattctgaggaagtttgcagatgcgtgcccagttattggaaacgtcctcagatgatgagt

SEQ ID NO: 20949 - DNA, 1260 bp, synthetic construct
  misc_feature 1..1260: note = source = /note="Description of Artificial Sequence: Synthetic coding sequence"
  source 1..1260: mol_type = other DNA
atgcatctgctcggctttttctcggttgcatgttcgctgttggcggctgcactcctgcctgggcctagggaagccccagcagcggcagcagctttcgaatccggattggatctgtctgacgccgaaccagacgcaggagaagctaccgcctacgcatccaaagatcttgaagaacaacttcgttcagtgtccagcgtcgatgaacttatgaccgtgctttaccctgaatactggaagatgtacaagtgccagcttcggaaaggcggctggcaacataaccgcgaacaggccaatctcaattcgcggaccgaagaaaccattaagtttgccgctgctcactacaatacggagatcctcaagtccatagacaatgaatggagaaagactcaatgcatgcctcgcgaagtgtgcattgatgtcggaaaggaatttggtgtggccactaatacctttttcaagcccccttgtgtctcggtctaccggtgtggaggatgttgtaactcggagggtctgcaatgcatgaatacctcgacttcctacctttccaagacgctgtttgaaattactgtgccactttcacaagggcccaagcctgtgaccatttcgtttgcgaaccacacttcgtgcaggtgtatgtccaaacttgatgtgtacagacaggtgcactcaatcatcagacggagccttcctgccaccctgccccaatgtcaggcggcgaacaagacttgcccaactaattacatgtggaacaaccacatttgtcgttgtctcgcacaggaagatttcatgttttccagcgacgcaggcgacgatagcactgatggattccacgacatatgtggacctaacaaggaactcgacgaagaaacttgccaatgtgtgtgtcgcgccggcctccgacctgcatcctgtggaccacataaagaattggatagaaatagctgtcaatgtgtatgtaagaacaagttgttcccgtcgcaatgtggtgccaatcgtgagttcgatgaaaatacttgccagtgtgtgtgtaagcgcacctgcccacgaaaccaaccgctgaacccaggcaagtgcgcctgtgagtgtaccgaatcacctcagaaatgccttcttaaaggaaaaaagtttcatcatcaaacctgttcctgttacagacggccatgtactaatcgccaaaaagcatgtgaacccggattcagttacagcgaagaagtctgtcgttgtgtgccttcctactggaaaagaccacaaatgatgtcc

SEQ ID NO: 20950 - DNA, 1260 bp, synthetic construct
  misc_feature 1..1260: note = source = /note="Description of Artificial Sequence: Synthetic coding sequence"
  source 1..1260: mol_type = other DNA
atgcaccttctgggatttttctctgtcgcctgctccctgctggcggctgcgctattgcctggacctagggaggcccccgcagctgccgcagctttcgagtccgggttagacctctccgacgctgagcctgatgccggggaggctaccgcatacgccagcaaggacctcgaggagcaactgcgttctgtgtcaagtgttgacgaacttatgaccgtgttataccccgaatattggaaaatgtacaagtgccagctacgcaaggggggatggcagcacaatagggagcaggccaacctcaactctcgcaccgaagaaacaatcaagttcgccgcggcgcattacaacactgagatacttaagtctatcgacaatgaatggcgaaagactcaatgcatgcctcgcgaggtgtgtatcgacgtcggtaaagaatttggagtagccaccaataccttcttcaaaccgccgtgcgtgagtgtataccgctgcggcgggtgctgcaactctgaagggctgcagtgcatgaatacatctacctcatacctctccaagaccttattcgagatcaccgtgccgctgtcccaaggacccaaacccgtcacaattagtttcgccaaccatacaagctgccgctgtatgtctaagctggatgtatacaggcaggtgcacagtatcattcgaaggtcattacccgcgacgctaccacagtgccaggctgctaataaaacatgtccaactaactacatgtggaacaaccatatatgccggtgcttggctcaggaagacttcatgttcagcagcgatgctggggatgactccacagacggttttcacgatatttgcggacctaataaagaattggatgaagaaacctgtcagtgtgtatgtcgcgccggcctgaggcccgcgtcttgcggtcctcacaaagagcttgacagaaatagctgtcagtgcgtgtgcaagaacaagttgttccctagccagtgtggtgctaaccgggagttcgatgaaaatacctgccagtgtgtctgtaagaggacctgcccgaggaatcaaccacttaacccggggaagtgcgcatgtgagtgcacagagtccccccagaaatgtcttctcaaaggcaaaaagtttcaccaccagacttgtagttgctatcgccgaccctgcacaaacagacaaaaagcctgcgaaccagggtttagttactccgaagaagtgtgtaggtgtgtgccttcctattggaaaagacctcaaatgatgtcc

SEQ ID NO: 20951 - DNA, 1260 bp, synthetic construct
  misc_feature 1..1260: note = source = /note="Description of Artificial Sequence: Synthetic coding sequence"
  source 1..1260: mol_type = other DNA
atgcatttgctggggttcttctctgtggcctgcagcctgctggcggccgcgctcctcccgggaccgcgcgaggccccggcagccgccgctgcttttgaatcgggtcttgacctctccgatgccgagccggatgcaggcgaggccactgcgtacgctagcaaagacttggaagagcagctgcgctccgtgagctcagtcgacgaactgatgaccgtgctgtaccctgagtactggaaaatgtacaaatgccagctccgtaaggggggatggcaacacaacagagaacaggccaacctcaactcgcgcaccgaggaaactattaaattcgccgcagcccactacaacaccgagatcctgaagagcatcgataacgaatggagaaagacgcagtgcatgccgcgcgaagtctgcattgacgtgggaaaggagttcggagtagcgactaataccttcttcaagccgccttgcgtgtcggtgtaccggtgcggaggatgttgcaactccgaaggactccaatgcatgaatacctccacgagctacctctcaaagaccctgtttgagatcaccgtgccactgtcgcaggggccgaagccggtgaccatctcctttgctaaccatacttcgtgccgctgcatgtccaaactcgatgtctacagacaggtgcacagcatcatccgccggagcctgccagcaactctgccccagtgccaggccgcaaataagacctgcccaactaactatatgtggaataatcacatctgtcggtgtctggctcaagaggatttcatgttctcgtcagatgcgggtgacgactctactgacggctttcacgacatctgcggcccgaacaaagaacttgatgaagagacttgccaatgtgtgtgccgggcgggtctgaggcctgcatcgtgtggaccacataaggaattggacagaaactcgtgtcaatgtgtctgtaagaacaagctgttccctagtcagtgtggagcgaatagggaattcgacgagaatacctgccaatgcgtctgcaagcgaacctgccccaggaatcagccgcttaacccaggcaagtgcgcctgcgaatgcactgaatcgccacagaaatgcctgctgaagggcaaaaagttccaccatcaaacgtgctcatgttaccggcgcccatgtactaacagacagaaggcttgcgaacctggattttcctactcagaggaagtttgccggtgcgtgccgtcatactggaagcgcccccagatgatgtcc

SEQ ID NO: 20952 - DNA, 1260 bp, synthetic construct
  misc_feature 1..1260: note = source = /note="Description of Artificial Sequence: Synthetic coding sequence"
  source 1..1260: mol_type = other DNA
atgcaccttctcggatttttctcagtggcctgctcgttgttggccgctgcactgctcccgggcccgagagaggccccagccgccgccgccgcgtttgaatccggactggacctgagcgacgccgaaccggatgccggagaggccactgcgtacgcgtcgaaggacttggaagaacagctgcggtccgtgtcctccgtggacgagctgatgactgtcctgtatccggaatactggaagatgtacaagtgccagctgcggaaagggggctggcagcataaccgcgaacaggccaatctgaattcccggactgaggaaaccataaagttcgcagccgcccattacaacacggaaattctgaagagcatcgataatgagtggagaaagacccaatgcatgccgcgggaggtgtgtatcgacgtgggcaaagagtttggagtggctaccaacactttcttcaaaccgccgtgcgtgtcggtgtaccggtgcggcggatgctgtaacagcgaaggactccaatgcatgaacactagcaccagctacctctcaaagaccttgtttgaaatcaccgtgcctctgagccaaggcccaaagccggtcaccatctcgttcgccaatcatacctcatgccgctgtatgtcgaagctggacgtgtaccgccaagtgcactccatcatccgccggagcctgccggccaccctcccgcagtgccaagcagccaataagacttgccctaccaactacatgtggaacaatcatatctgccggtgcctcgcccaagaagatttcatgttcagctccgatgcgggcgacgactcgactgatggattccacgacatttgtgggccaaacaaggaactcgatgaagaaacctgccaatgcgtgtgtagggcgggactgaggcctgcctcgtgcggaccacacaaggagctggatcggaattcttgccagtgcgtgtgtaaaaacaaactgttccctagccagtgcggagcaaaccgagaattcgacgaaaatacttgtcagtgcgtgtgcaagcgaacttgtccgcgcaatcagccgctgaatccaggaaaatgcgcttgcgagtgtaccgagtcgccgcagaaatgcctgctcaagggcaagaagttccaccaccaaacttgctcatgctacagacgcccgtgcactaacaggcaaaaggcatgtgagccggggttttcgtactcggaggaggtgtgccgctgcgtgccgtcgtactggaagcgcccgcaaatgatgtcg

SEQ ID NO: 20953 - DNA, 1260 bp, synthetic construct
  misc_feature 1..1260: note = source = /note="Description of Artificial Sequence: Synthetic coding sequence"
  source 1..1260: mol_type = other DNA
atgcacttgttaggttttttttctgtggcctgctcgctcttggcagctgctcttttgcccggaccgcgtgaagctccggcggcggcggccgctttcgagtccggactggatctcagcgacgcggaaccggacgctggtgaagccactgcttacgcgtcaaaggatcttgaagagcaactaagatcggtctcctccgtcgacgagttgatgaccgttttgtatcccgagtactggaaaatgtataagtgtcagctccgcaaaggcggatggcaacacaaccgagagcaagctaacctaaactcgagaactgaggagacaattaagttcgctgcggctcactacaatacggaaatcttgaaatctattgacaacgaatggcgcaagacacagtgtatgcctcgcgaggtatgtatagacgtggggaaggaattcggtgtggcgacgaatactttctttaagcctccctgcgtctcagtctatagatgcggtgggtgttgcaactctgagggtctacagtgcatgaacacgtccacatcttatctgtctaagactttgtttgaaataacagtgcccctgtcgcagggcccgaagcccgtcaccatcagtttcgctaatcatacctcttgcaggtgtatgagcaaactcgacgtctacaggcaggtccacagcatcatcagacggtcactaccggccacccttccgcaatgccaagcggcgaataaaacttgcccgaccaattacatgtggaacaaccacatttgccggtgcctggcccaggaggactttatgtttagttccgatgctggagacgactctacggatggcttccatgatatttgtggtcctaataaggaactggatgaggaaacctgtcaatgtgtttgcagggctggactccgccctgcaagctgcggcccacataaagaacttgacaggaactcgtgccaatgcgtctgcaaaaataagctgttcccgtcccagtgcggagcgaaccgagaattcgatgagaatacatgtcagtgtgtctgcaagcgcacttgccctagaaaccagccactcaatccaggcaagtgcgcgtgcgagtgtactgagtccccccagaagtgcctactaaaagggaaaaagtttcatcatcagacctgctcctgttatagacggccatgcaccaaccgccagaaggcctgtgaaccaggcttcagctattcagaagaagtctgccggtgcgttcctagctactggaagcgacctcagatgatgtca

SEQ ID NO: 20954 - DNA, 1260 bp, synthetic construct
  misc_feature 1..1260: note = source = /note="Description of Artificial Sequence: Synthetic coding sequence"
  source 1..1260: mol_type = other DNA
atgcatctgcttggattcttttcagtggcttgcagcctgttggccgcggccctcctgccgggtccacgggaagcaccggcagcggcagctgctttcgagtccggcctggatctgagcgacgccgaaccggacgccggagaggcgaccgcatacgcaagcaaggatctcgaggagcagctgcggagcgtctccagcgtggatgagctgatgacggtgctgtacccggagtactggaagatgtacaaatgccaacttaggaaaggcggctggcagcataatagagagcaagccaacctgaattcccgtaccgaagagactattaagttcgcggcggcacactacaataccgagatccttaagagcatcgataatgaatggcgcaagactcagtgcatgcctcgggaagtgtgcatcgacgtgggaaaggaattcggtgtggccaccaacaccttctttaagccgccgtgcgtgagcgtgtaccggtgcggagggtgctgcaactcagaagggctgcaatgcatgaacaccagcacttcctacctgtccaagactctgttcgagatcactgtgccactctcgcagggacctaagccagtcactatctccttcgcgaaccatacttcgtgccgttgtatgtctaagttggatgtctaccggcaagtccactccatcatccggcgctcgctgccggccactctcccacaatgccaggccgcgaataagacctgtcccacgaattacatgtggaataatcacatctgccgctgccttgcgcaagaagatttcatgttcagctcggatgctggagacgactcaactgacggatttcacgacatttgcggaccgaataaagagctcgacgaggagacgtgccagtgcgtgtgcagagcaggcctccgcccagcctcgtgcggaccacacaaggaactggatagaaattcctgccagtgcgtttgcaagaacaaacttttcccatcgcagtgtggcgcaaatcgggaattcgacgaaaacacttgccagtgcgtctgtaagcgcacctgcccacgcaaccaaccccttaacccgggaaagtgtgcctgcgaatgtactgaatccccccaaaagtgtctcctgaagggaaagaagtttcatcatcagacttgctcctgttaccggcggccttgcaccaatcgccaaaaagcatgcgaaccaggcttctcctactcggaagaagtctgccgatgcgtgccgtcgtactggaagaggccgcaaatgatgtca

SEQ ID NO: 20955 - DNA, 1260 bp, synthetic construct
  misc_feature 1..1260: note = source = /note="Description of Artificial Sequence: Synthetic coding sequence"
  source 1..1260: mol_type = other DNA
atgcatcttcttggcttcttttccgtcgcgtgttcacttttggcagccgcgctgctgcctggtccacgcgaagcaccagcagcggctgccgcattcgaatcgggacttgatctcagcgatgcggaacctgatgccggtgaagcaaccgcctacgcgagcaaggacttggaggaacagctgcggagcgtgtccagcgtggatgagctgatgaccgtgctttaccctgaatattggaagatgtacaagtgtcaattgagaaagggtggttggcaacataacagagagcaggcaaatttgaatagccgaactgaagagactattaagtttgcagcagcacactataacactgaaattctcaagtcgatcgataacgagtggagaaagacccaatgtatgccacgtgaagtgtgtatcgacgtgggaaaggagttcggagtcgcgactaacacctttttcaagcctccgtgcgtgtcagtgtacagatgtggaggatgctgtaacagcgaaggcctgcagtgtatgaacacgtcgactagctacctgtccaagactctttttgaaattaccgtcccactgtcccaaggtccaaagccagtgaccatatccttcgccaaccatacgagctgtagatgtatgagcaagctcgacgtgtacaggcaagtgcactcaatcatccgaagatcccttccagcaactctgcctcagtgccaggcagccaataagacctgtcctaccaactacatgtggaataaccatatttgtcgttgtcttgcccaggaagatttcatgttctcgtctgacgcaggcgatgattccactgacggatttcatgatatctgcgggccaaacaaagaattggatgaagagacttgtcagtgtgtctgtcgggcagggctcagacctgcatcttgtggaccccataaggaactcgataggaattcgtgccaatgtgtctgtaagaataaactgtttccatcacagtgtggtgcgaaccgagaatttgacgaaaacacctgtcagtgtgtatgtaaaagaacttgtccgcggaatcaaccactcaaccctgggaagtgtgcatgcgaatgcactgagagcccccaaaagtgccttctgaaagggaagaagttccaccatcaaacttgttcgtgttaccggcgaccatgtactaaccgccagaaggcttgcgaaccgggattctcatactcagaagaagtctgtagatgtgtgccttcctattggaaaagaccacagatgatgtcc

SEQ ID NO: 20956 - DNA, 1260 bp, synthetic construct
  misc_feature 1..1260: note = source = /note="Description of Artificial Sequence: Synthetic coding sequence"
  source 1..1260: mol_type = other DNA
atgcatcttcttggtttcttttcagtggcctgttcactgttggccgcggcacttctgcccggacctagagaagctcccgcagcagcggcagcatttgaaagcgggcttgatctttccgacgccgaacctgacgcaggtgaggcaactgcatacgcatcgaaggatcttgaggaacagttgcgatcggtgtcctccgtcgatgaactgatgacggtcctgtaccctgagtactggaagatgtacaagtgtcaacttaggaagggcggatggcagcacaacagggaacaagccaacctgaattcacgcaccgaagaaaccataaagtttgcagcagcacattacaacaccgagatcctcaaatcaattgacaacgagtggcggaaaactcaatgtatgccgcgagaagtgtgtatcgatgtcggcaaggagtttggtgtggccacgaacacgttctttaaacctccttgcgtcagcgtttaccgatgtggaggctgttgtaacagtgagggactgcagtgtatgaacacctccacttcctacctcagcaagactctctttgagatcacggtcccactgtcccaaggccctaaacctgtgactatatcgtttgcaaatcacacttcatgccggtgtatgagcaagttggacgtgtaccgccaggtccactccatcataagacgcagcctgcctgccactttgccccaatgtcaagcagcaaacaaaacgtgccctaccaactacatgtggaacaaccacatttgtagatgtctggcacaagaggatttcatgttctcatcagatgcaggtgatgatagcaccgatggatttcacgatatttgcggaccaaacaaggagcttgatgaagagacttgtcagtgtgtgtgcagagccggacttaggccggcttcctgtggaccgcataaggaacttgacagaaatagctgtcaatgcgtctgtaagaacaaactgtttccttctcagtgcggagcaaatcgggagttcgacgagaatacttgtcaatgtgtctgcaagcgcacctgcccacgaaatcagccccttaatcctggcaagtgtgcatgtgagtgtaccgaatctccccagaagtgtctgcttaagggaaagaaatttcaccatcaaacttgctcgtgctacagacgtccttgtaccaatagacaaaaggcgtgcgagccaggattctcctacagcgaggaagtgtgtagatgtgtcccatcctattggaaacgacctcaaatgatgagc

SEQ ID NO: 20957 - DNA, 1260 bp, synthetic construct
  misc_feature 1..1260: note = source = /note="Description of Artificial Sequence: Synthetic coding sequence"
  source 1..1260: mol_type = other DNA
atgcatctgctcggtttcttctccgtggcatgttcgctgttggccgcagccctcctgcccgggcctagagaagctccggccgctgccgccgcgtttgaatcaggcctggatctttccgacgcggaacctgatgcgggagaggcgaccgcatacgcctcgaaggatcttgaggagcagctgcgctccgtctcatccgtcgatgagcttatgacggtgctgtacccagagtattggaagatgtacaagtgccaactgaggaagggaggatggcaacacaaccgcgagcaagcgaatctcaattcgcggaccgaagagacgattaagttcgccgcggcgcattacaacactgaaatcctcaagtccatcgataacgaatggaggaaaacccaatgcatgccgcgagaagtgtgcatcgatgtcggaaaagagttcggagtggccacgaatacctttttcaaaccgccttgcgtctcggtgtaccggtgcggcggatgttgcaacagcgagggcctccagtgcatgaacacctcgacttcctacctgagtaagaccctctttgaaatcactgtgccgctgagccagggcccaaagccagtgactattagcttcgccaaccatacttcatgccggtgcatgtcaaagctggacgtctacagacaggtgcattctatcatccggcgctcactccctgctaccctgcctcagtgccaagccgccaataagacttgcccaacgaactacatgtggaacaatcacatttgtagatgccttgcccaggaagatttcatgttctcgtcagacgcaggagatgattccactgacggcttccatgatatctgcggaccaaataaggaactcgacgaagaaacctgccaatgtgtctgccgggctggactccgccctgcatcatgcggaccgcataaggagctggaccggaattcctgtcagtgtgtgtgcaagaacaagctctttcctagccaatgcggagctaatcgggaatttgacgagaacacttgtcagtgcgtctgcaagaggacctgtccacgaaatcaaccgctgaatccaggtaaatgcgcttgtgaatgcaccgaatccccccaaaagtgcctgttgaagggaaaaaagttccatcaccagacttgctcgtgctaccgtagaccctgtactaaccggcagaaagcgtgcgaaccgggattttcgtactcggaagaggtgtgtagatgcgtcccctcgtactggaaacggccgcaaatgatgtcg

SEQ ID NO: 20958 - DNA, 1260 bp, synthetic construct
  misc_feature 1..1260: note = source = /note="Description of Artificial Sequence: Synthetic coding sequence"
  source 1..1260: mol_type = other DNA
atgcacctgctcggcttcttttcggtcgcctgctccctccttgcagcagctctcctgcccggaccccgggaagcgccagcagcggccgcggcatttgaatcgggactcgacctgtctgatgcggaacccgacgccggagaggccactgcatacgcgtcgaaggatctggaagagcagctgcggtccgtcagctccgtcgacgaactgatgaccgtgctgtacccggaatactggaagatgtacaaatgtcagctgaggaagggcggttggcaacataacagagaacaggctaacttgaactctcgcactgaagaaaccattaagttcgcggcagcgcattacaatactgagatcttgaaatccattgataacgaatggagaaagacccagtgtatgccgcgcgaggtctgcatcgacgtgggaaaggaattcggagtggcgaccaataccttctttaagccaccgtgtgtgtccgtctaccgatgcggcggatgctgcaattcagaaggattgcaatgtatgaacacttcgacctcctaccttagcaagacgctgttcgaaataactgtgcccctttcgcaaggaccgaaacctgtcaccatctcattcgcaaaccacacttcctgccgctgcatgagcaagctggatgtttaccgccaggtgcactccatcattcggagatccctgccagcgaccctcccgcagtgccaggccgctaacaaaacttgcccgaccaactacatgtggaacaatcacatctgccggtgcctggcccaggaggactttatgttctcctctgacgctggagatgattccactgacggatttcacgacatctgcgggccgaataaggagctcgatgaggaaacctgccaatgcgtgtgtcgcgcaggacttcggccagcgtcttgcggaccacacaaagagctggacagaaattcatgccagtgtgtctgcaagaacaagctgtttccgagccaatgcggagcaaacagagaattcgacgagaatacctgtcagtgcgtctgcaaaaggacctgtccaagaaatcagccactcaatcctggtaagtgcgcctgcgaatgcactgagtcgccacagaagtgcctgctgaagggtaagaaattccatcaccagacgtgctcatgctaccgcaggccgtgtaccaatcgccagaaggcgtgtgaacctggattcagctactccgaagaagtgtgtcgctgcgtcccttcatactggaaaagaccgcagatgatgagc

SEQ ID NO: 20959 - DNA, 1260 bp, synthetic construct
  misc_feature 1..1260: note = source = /note="Description of Artificial Sequence: Synthetic coding sequence"
  source 1..1260: mol_type = other DNA
atgcatctgcttggcttcttcagcgtggcttgctcactgctcgccgcggcgctgctgcccggacctagagaagcgccggcagccgccgcggcattcgagtccggcctggacctgtccgatgcagagccggacgccggagaagcgactgcctacgcctcaaaggacctggaggagcagctgcggtccgtctccagcgttgatgagctgatgactgtgctctaccccgaatactggaagatgtacaaatgccaactccggaaggggggatggcagcacaatagagaacaggctaatcttaattccagaactgaggaaacgatcaagttcgctgctgcccattacaacactgagatcctgaagagcatcgataacgaatggagaaaaacccagtgcatgccgagggaagtctgtatagacgtcgggaaagaatttggtgtggccactaacacgttctttaagccgccatgcgtgtcggtgtacagatgcggaggatgctgcaattcggaaggactccagtgtatgaacacttccacctcttacctgtcgaaaaccttgtttgagattactgttccgctgtcccagggtccgaagccggtgactatctcgttcgcgaaccacacctcatgtcgatgcatgtccaagctggacgtctatagacaggtccactcaatcatccggcggtcactcccggcaactctccctcaatgccaggctgctaataagacttgccctacgaactacatgtggaataaccatatctgtagatgcctcgcccaggaggatttcatgttttcctcggatgcaggcgacgatagcaccgatggatttcacgatatctgtggaccaaacaaggaactggacgaggaaacctgtcaatgtgtttgtcgggcgggactgcggcctgcaagctgcggaccccacaaggagttggacagaaactcgtgccagtgtgtctgcaagaacaaactgtttccatctcagtgcggggccaacagggaattcgatgaaaacacttgtcaatgcgtttgcaagagaacttgtccacggaatcaaccgctgaatccaggcaagtgtgcgtgcgaatgcaccgaatcgccacaaaaatgcctgctgaagggaaaaaagttccaccaccaaacctgctcctgctaccggcgcccatgcaccaatcgccagaaagcctgcgagccgggattctcgtactccgaggaggtgtgcaggtgcgtgccctcgtactggaagaggccacaaatgatgtca

SEQ ID NO: 20960 - DNA, 1260 bp, synthetic construct
  misc_feature 1..1260: note = source = /note="Description of Artificial Sequence: Synthetic coding sequence"
  source 1..1260: mol_type = other DNA
atgcatctgctcggattcttctcagtggcatgctcactgctggcagccgccctgctgcccgggccgcgggaggcgcctgctgctgcggctgcatttgagtctggccttgacctgagcgacgcggaaccggatgcaggcgaggccactgcctacgctagcaaggacctcgaagagcagctgcgctcggtgtcgtccgtcgacgagctgatgacggtgctgtacccagagtactggaagatgtacaagtgccaattgcgcaagggaggatggcagcacaatagggagcaggcaaatctcaacagcaggacggaagaaacgatcaagttcgcagctgcacactacaacactgaaatcctgaagtcgattgataacgaatggcgcaagactcaatgtatgccgagagaagtttgtattgatgtcggaaaggaattcggagtggccacgaacacctttttcaagccgccttgcgtgtcagtgtaccgctgcggagggtgttgcaattcagaggggctgcagtgtatgaacacgtccacctcatacctgtccaaaaccctgttcgagattaccgtgcctctgagccagggaccgaaaccggtgaccatcagctttgcaaatcacaccagctgccgctgtatgtctaaactggacgtgtaccgccaggtgcactccatcatccggaggtccctccctgccacccttccgcaatgccaggcagcaaacaagacgtgtccgaccaactacatgtggaataaccacatctgtcgttgtctggcacaggaggactttatgttctcatcggatgccggcgacgattccactgacggatttcatgacatctgcggccctaacaaggaactggacgaagaaacttgtcagtgcgtgtgccgagccggcctgcgccccgcctcgtgtggaccacataaagaactggatcgcaattcatgccaatgcgtatgcaagaataagctcttcccgtcccagtgcggggctaacagagagtttgacgaaaatacttgtcaatgcgtttgcaagcgcacttgcccgcgaaaccaacctctgaatcccggaaaatgcgcgtgtgagtgtactgaatccccacagaagtgcttgttgaagggcaagaaattccatcaccaaacttgctcctgctaccggcggccgtgcaccaaccggcagaaagcctgtgagccgggtttctcctactcggaggaggtctgcagatgcgtcccatcctactggaagcgccctcagatgatgtcc

SEQ ID NO: 20961 - DNA, 1260 bp, synthetic construct
  misc_feature 1..1260: note = source = /note="Description of Artificial Sequence: Synthetic coding sequence"
  source 1..1260: mol_type = other DNA
atgcacctgcttgggttcttctccgtcgcatgctccctcttagccgcggctctgctgccaggcccgcgggaagccccagctgcggccgctgccttcgaatcgggtctggatctgtccgatgcagaacccgacgctggggaggcaacagcatacgcctcgaaagacctggaagagcagttgcgatccgttagtagtgtggatgagctgatgacagtgctgtatcctgagtactggaagatgtataaatgccagctgcggaagggcggatggcaacataaccgggagcaggccaatcttaacagcagaactgaggaaacaattaaattcgcagctgcccattacaacaccgagatcctgaaaagcatcgacaatgagtggcggaagacccagtgtatgccacgcgaggtctgcatcgacgtgggcaaagagtttggcgtggcaacaaacactttcttcaagccaccctgcgtgtctgtgtatcgttgtggcggttgctgcaattcagagggactgcaatgcatgaacacttcaacatcatacttgtcaaagaccctctttgagatcaccgtccccctgtcccaggggcccaagccagtgactatatcctttgccaatcacacctcctgtcggtgcatgtccaaactggatgtttacagacaggtccactccatcattcgccgttctttgcctgccacactgccacagtgccaagcagcgaataagacatgccctacgaattatatgtggaacaaccacatctgccgatgcctggcacaggaggactttatgttctcatcagatgccggtgacgattccaccgatggctttcacgatatctgcggacctaacaaggagctggatgaagaaacctgccaatgtgtgtgccgggctggcctgaggcccgcctcgtgcggtccccacaaggaactggatcgcaacagttgtcaatgcgtctgcaaaaataaactgttcccttcccagtgtggggcaaatcgagagtttgatgaaaacacatgccagtgcgtatgcaagcgtacttgcccgcgcaaccagccactaaaccctggaaagtgtgcctgcgagtgcactgaatctccacagaagtgtcttcttaaaggtaaaaagtttcaccaccagacctgcagctgttacaggcgcccctgtactaacagacagaaggcatgtgagcctgggttttcatacagcgaagaagtgtgccgctgcgtcccttcgtattggaaaaggcctcaaatgatgagt

SEQ ID NO: 20962 - DNA, 1260 bp, synthetic construct
  misc_feature 1..1260: note = source = /note="Description of Artificial Sequence: Synthetic coding sequence"
  source 1..1260: mol_type = other DNA
atgcacctgctgggatttttctcggtcgcctgctccctcctggctgcagctctgctgccaggaccgcgggaagctccagcggccgcagccgccttcgagtcaggactcgacctgagtgacgctgagcctgacgcaggagaagccactgcatacgcgtcaaaggatctcgaggagcaactgcgctcagtgtcctccgtggatgagctcatgaccgtgctgtacccagagtactggaagatgtacaagtgccagctgcggaaaggaggctggcaacataacagggaacaggcgaacctcaactcacgcactgaagaaaccatcaaattcgccgcagctcattacaacactgagatcctgaagtcaatcgataacgagtggcgcaagacccaatgcatgccgcgggaagtctgcattgatgtgggaaaagaatttggagtggcaactaacactttctttaaaccgccttgcgtctccgtgtacagatgtggcggctgttgtaactccgaaggtttgcagtgtatgaacaccagcacctcgtatttgtcgaagactctcttcgagatcactgttcctctcagccaggggccgaagccggtgaccatctcattcgctaatcatacctcctgccgctgtatgtcaaagctcgacgtgtaccggcaggtgcatagcatcatccgccgatccctcccggccacgcttcctcaatgccaagccgcgaacaagacctgcccaactaactacatgtggaacaatcacatctgccgctgtctggcgcaggaagatttcatgttcagctccgatgctggagacgattcgaccgacggtttccatgacatctgtggcccaaacaaagagctggatgaggaaacgtgccagtgcgtctgtcgggccggcttgcgcccggcgtcatgcgggccgcataaggagctggatcggaactcctgccagtgcgtgtgcaagaacaagctcttcccatcacagtgcggcgccaacagagagttcgacgagaacacttgtcagtgtgtgtgcaaacgcacctgtccgcggaaccagccgctcaaccctggaaagtgcgcatgcgaatgcactgagtcgccacagaaatgcctgctcaaaggcaagaagttccaccaccagacctgctcctgctaccgccggccctgcactaaccgccagaaagcgtgcgaaccgggtttttcatactctgaggaagtgtgccggtgcgtgccgtcatactggaaaaggcctcagatgatgtcg

SEQ ID NO: 20963 - DNA, 1260 bp, synthetic construct
  misc_feature 1..1260: note = source = /note="Description of Artificial Sequence: Synthetic coding sequence"
  source 1..1260: mol_type = other DNA
atgcacctgctgggctttttctctgttgcttgttcccttctcgctgccgccctcttgccagggcctcgcgaagccccagccgccgccgcagcatttgagagcggtctggacctgtcagatgccgagcctgacgcaggcgaggcaaccgcatacgcgagcaaggatctcgaggaacaattgcgctccgtttccagcgttgacgaactgatgaccgtgttgtaccctgaatactggaagatgtacaagtgccaattgaggaaaggagggtggcagcacaacagagagcaggctaacctgaacagtcggaccgaggagaccatcaagtttgcggcagctcattataatactgaaatcctcaaaagcatcgacaacgagtggcgtaagacccagtgtatgccacgtgaagtttgcatcgacgtcggcaaagaattcggggtggcaaccaacacattctttaaacccccttgcgttagcgtgtatcgctgcggtgggtgttgtaacagcgagggtcttcagtgtatgaacacatccacctcctatctgtcgaagacgctcttcgagatcaccgtcccattgtctcagggacccaagcctgtcactatctccttcgccaaccacacctcttgccgctgcatgagcaagcttgatgtgtatcgccaggtccattccatcattcgccgcagcctgcctgccacccttccccagtgccaagccgccaataagacatgccccaccaattatatgtggaacaatcatatctgcaggtgcctggctcaggaggacttcatgttctcttcagatgctggcgacgattccaccgacggcttccatgacatctgtgggcctaacaaggaactggacgaagagacctgtcaatgcgtgtgccgtgcagggctgcgacccgcatcttgcggccctcataaggagcttgacaggaactcatgccagtgtgtgtgcaaaaacaaactctttccttcccaatgcggcgccaacagagaattcgatgagaacacatgtcagtgcgtctgtaagcgcacctgtcctcgcaatcaaccactgaacccaggcaaatgtgcctgcgaatgtactgaatcaccccagaagtgcctcctgaaagggaagaaatttcaccatcagacatgtagttgctatcggagaccatgtacgaaccgtcaaaaggcatgcgagcctggattctcctattctgaggaggtttgcaggtgtgttccaagctactggaaacggccccagatgatgagt

SEQ ID NO: 20964 - DNA, 1260 bp, synthetic construct
  misc_feature 1..1260: note = source = /note="Description of Artificial Sequence: Synthetic coding sequence"
  source 1..1260: mol_type = other DNA
atgcacctccttgggttcttttcggttgcctgctccctgctggctgcagccctcctgccgggaccgcgggaggccccagcggcggcagcggccttcgaatcaggactggacctcagcgatgccgagcctgacgctggcgaagcgactgcgtacgcgagcaaggacctggaagagcagctgcggtccgtgtcatcggtcgacgaactcatgaccgtgctgtacccggagtactggaagatgtacaagtgccagctgaggaagggcgggtggcagcacaaccgcgaacaggcaaacctcaacagccgcaccgaagaaacgatcaagttcgcagccgcccactacaacacggaaatcctcaagagcatcgacaatgaatggagaaaaacgcaatgcatgccgcgggaagtgtgcatcgacgtcggaaaggaattcggtgtggctaccaacactttcttcaagccaccatgcgtctcagtgtatcggtgcggaggatgttgcaactccgaagggctgcagtgcatgaacacttccaccagctacctgagcaaaaccctgttcgagatcactgtcccgttgtcacaaggaccgaaaccggtgaccatctcgttcgccaaccataccagctgtcgctgtatgtcgaagctggatgtgtacagacaggtgcattcaatcatcaggcgctcattgcctgctacgctgccgcagtgccaggctgcgaacaagacttgtccaactaactacatgtggaacaaccacatctgccgctgcctggcccaggaggactttatgtttagctccgatgctggtgatgactccactgacggtttccacgacatctgcggaccgaataaggagctcgatgaggaaacctgtcaatgtgtgtgtcgcgccggactccggccagcttcgtgtggaccacacaaggagctggataggaactcatgtcaatgcgtgtgtaaaaacaagctgttcccctcgcagtgcggagctaacagagaattcgacgaaaatacttgtcagtgtgtgtgcaagcggacctgcccacggaaccagccgcttaatcctgggaagtgcgcatgtgaatgcaccgaatcaccacagaaatgccttctgaagggaaaaaagttccaccatcagacctgctcctgctaccgccgcccttgtacgaataggcaaaaggcctgcgaaccgggtttctcgtactctgaagaagtttgccggtgtgtgccaagctactggaaaagaccacagatgatgagc

SEQ ID NO: 20965 - DNA, 1260 bp, synthetic construct
  misc_feature 1..1260: note = source = /note="Description of Artificial Sequence: Synthetic coding sequence"
  source 1..1260: mol_type = other DNA
atgcatctgctcggatttttttcagtggcttgctctttgctcgcggcggccttgttacctgggcctagggaagctccagccgccgcggctgcgtttgagagcggtttggatttatccgacgcagagcctgatgcgggtgaagctacagcatacgcctccaaggatttggaggaacagctgcgaagtgtctcctccgtggatgaactgatgacagtgctttacccggagtactggaaaatgtataagtgccaactgaggaaagggggatggcaacataatagggaacaggccaatctcaacagtcgcacggaggaaaccataaagtttgctgcggcacattataacacagaaatactcaaatcaatcgacaacgaatggcggaagacacagtgcatgcctcgggaggtgtgtattgacgtgggaaaggaattcggtgtggcaaccaacacatttttcaaaccaccttgtgtgtcggtgtatcggtgcggaggatgttgcaattctgaagggttgcagtgtatgaatacatctacctcttatctgtctaagaccctgttcgaaataaccgtccctctgagccaggggcctaagcccgtgactatctctttcgccaaccatacaagttgcagatgtatgtcaaagctagacgtctacagacaggtccatagcatcattaggcgctctctgcccgccaccctcccacaatgtcaagctgctaataagacctgtcctacgaattatatgtggaacaaccacatttgccgttgtttagcacaggaagactttatgtttagttcggacgctggagatgactccacagatggctttcacgatatttgtggaccaaataaggagttggacgaggaaacatgtcagtgtgtctgtcgggcaggcctccggccagccagctgcggacctcataaggagctggaccgcaatagctgccaatgcgtatgcaaaaataagctgttcccttcacagtgtggcgctaatagggagtttgacgagaacacctgccagtgtgtttgcaaaaggacttgcccccgcaaccagcccctgaacccgggaaagtgtgcttgcgagtgtactgagtcaccccaaaaatgcttgctgaaaggaaaaaagtttcaccaccaaacttgctcctgctatcgccgcccctgcacgaatcggcaaaaggcatgtgaacccggattttcctactcggaggaagtctgccgctgtgtgccctcttattggaagaggccacagatgatgagc

SEQ ID NO: 20966 - DNA, 1260 bp, synthetic construct
  misc_feature 1..1260: note = source = /note="Description of Artificial Sequence: Synthetic coding sequence"
  source 1..1260: mol_type = other DNA
atgcatctgttgggctttttctccgtcgcttgtagccttcttgcagccgctcttctgccaggacccagggaggctcctgccgccgccgcggcgtttgagtcagggctcgatctgtcagatgccgagcctgacgcaggtgaagcaaccgcgtacgcctcaaaggatttggaagaacaactcaggtccgtgtccagcgtggatgaactcatgactgtgctttacccagaatactggaaaatgtacaagtgtcagcttcggaaagggggctggcaacataaccgcgagcaggcaaacctgaactcgcgcactgaagagacgatcaaatttgcagcagcccactacaacaccgaaattctcaaatccatcgataacgagtggaggaaaacccaatgtatgccacgggaagtgtgtatcgatgtcggtaaagagttcggagtcgctactaacaccttctttaagcccccgtgtgtgtccgtctaccgttgcggcggatgttgcaatagcgagggacttcaatgtatgaacacctcgacctcctatctgtccaagaccctttttgaaattaccgtgcctctctcgcagggtcctaagccggtgaccatctcattcgcaaatcacacctcgtgccgctgtatgagcaaactcgatgtttaccggcaagtgcactccatcattcggagatcactccctgccactctgcctcaatgtcaagcagcgaacaaaacttgtcctacgaattacatgtggaacaatcacatttgccggtgtctggcacaggaggactttatgttttcgtcggatgcaggagatgatagcaccgacgggtttcacgacatctgcggacccaacaaagaacttgatgaagagacttgtcaatgcgtctgtcgcgcggggcttcgcccagcgtcatgtgggcctcataaggaactggacagaaactcgtgccagtgtgtgtgcaagaacaagctctttccaagccagtgcggagcgaatagagaatttgacgagaatacgtgtcaatgcgtgtgtaagcgcacctgtccacgaaaccagcctcttaaccccgggaaatgtgcgtgcgaatgtaccgagagcccacagaagtgtctccttaaggggaaaaagtttcatcaccagacttgctcatgttacagacggccctgtactaatagacaaaaggcctgtgaacctggcttttcatactccgaggaagtgtgtagatgcgtccctagctattggaagcggccccaaatgatgtcc

SEQ ID NO: 20967 - DNA, 1260 bp, synthetic construct
  misc_feature 1..1260: note = source = /note="Description of Artificial Sequence: Synthetic coding sequence"
  source 1..1260: mol_type = other DNA
atgcaccttttggggtttttcagcgtcgcctgcagcctccttgcagcagcgcttctgccaggtcctagggaggctccagctgcagcagccgcatttgaatcgggcttggatttgtccgacgcggaacctgacgcaggagaggcgaccgcatatgcatcaaaggaccttgaagagcaactcaggtccgtgagctccgtcgatgaactgatgactgttctctaccccgaatattggaagatgtacaagtgccagcttcgcaaaggagggtggcagcataatagagaacaagcaaacctgaatagcagaaccgaagaaacgatcaaattcgccgctgctcactacaacactgagattctgaaatcgattgataacgagtggcgtaaaacccaatgcatgcctcgcgaagtgtgtattgatgtcggaaaggaattcggagtggcgaccaataccttctttaagcctccatgcgtgtccgtctataggtgtggtggttgttgtaactccgagggactgcagtgtatgaatacttcgacctcctacctgtcgaaaaccttgttcgaaattacggtgcctctgtcacagggccctaaaccagtgactatatcttttgcgaaccacacctcgtgtcggtgcatgtccaagctcgatgtctaccgccaggtgcacagcataatccgacgatctctgcctgccaccctgcctcaatgtcaagccgcaaataagacttgccccaccaattacatgtggaataaccatatttgtagatgtcttgcacaagaggactttatgttttcgtccgatgcaggggacgactcaactgacggatttcatgacatttgcggccctaacaaggaattggatgaagaaacgtgtcaatgcgtctgtcgtgcagggctgcgccctgccagctgcgggccacataaggagcttgatcgtaactcgtgtcagtgtgtgtgtaagaacaagctgttcccatcccagtgtggagcgaatcgggaattcgacgaaaacacctgccaatgcgtgtgtaagagaacctgcccccgcaatcaaccccttaatccgggaaagtgtgcatgtgagtgtaccgaatctcctcaaaagtgtttgcttaaagggaaaaagtttcaccaccagacttgtagctgttaccgccgcccctgtactaatcggcaaaaagcgtgcgagcctgggttttcctactccgaagaagtctgtagatgcgtgcccagctactggaagaggccccaaatgatgtcg

SEQ ID NO: 20968 - DNA, 1260 bp, synthetic construct
  misc_feature 1..1260: note = source = /note="Description of Artificial Sequence: Synthetic coding sequence"
  source 1..1260: mol_type = other DNA
atgcacctgctgggcttcttcagtgtagcttgtagtctgctcgctgcggcactgttacccggccctagagaagcacctgctgccgcggcggccttcgagagcggcctggacctgagtgacgccgaaccggatgccggcgaagctaccgcttacgcctcaaaggatctagaggaacagcttcgctctgtgtcgtcggtggacgagcttatgaccgtgttgtatcctgaatactggaaaatgtataaatgtcagctacgaaagggaggctggcagcataatcgtgagcaggccaacctgaattctcgaacggaggagacgataaagttcgccgctgcgcactacaacacggaaatattgaagagtatcgataatgaatggaggaaaacccaatgtatgccccgcgaggtgtgcatagatgttggaaaggaatttggcgtcgctaccaatacatttttcaaaccgccctgtgtcagcgtttatcggtgcggcggatgctgtaactcagagggactgcagtgtatgaacacttctacaagctatctcagcaaaacactctttgaaattaccgtgcctttgtcacaagggcctaagcccgttacaatctccttcgcaaatcatacctcttgcagatgtatgagcaaactcgacgtgtacagacaggtgcactctatcattcggcggagccttcccgccacattaccacagtgtcaggccgctaataaaacttgccctaccaattatatgtggaacaatcatatttgtcgatgtttggcccaggaggatttcatgttctcctcagacgccggagacgattctacagatggcttccacgacatatgcggtccgaacaaggaactggatgaggagacgtgccagtgtgtgtgccgtgcgggtcttagacccgcttcttgcggaccccataaggaactggatcgaaacagctgccaatgtgtatgtaaaaacaagcttttcccgtcccaatgcggagccaaccgggaatttgacgaaaacacatgtcagtgtgtttgcaagagaacatgccctagaaaccagcccctgaatcccggaaagtgcgcatgtgaatgcaccgagtctccacagaaatgcctgctgaaggggaaaaagtttcaccaccagacttgctcatgttaccgaagaccctgtaccaaccggcagaaagcttgtgagcccggcttttcttactccgaggaggtgtgtagatgcgtccctagctactggaaacgacctcagatgatgtct

SEQ ID NO: 20969 - DNA, 1260 bp, synthetic construct
  misc_feature 1..1260: note = source = /note="Description of Artificial Sequence: Synthetic coding sequence"
  source 1..1260: mol_type = other DNA
atgcatcttctgggctttttctccgttgcatgcagccttttggcagcggcactgctgccaggtcctcgtgaggcgccagctgcggctgccgcgttcgagtctggtttggacttgagtgacgcggagccggacgccggcgaagctacagcatatgcgtctaaggacttggaagagcagttgcgcagcgtctcctccgtggacgagctgatgacagttctgtatccggagtattggaagatgtacaagtgccaactgcgcaagggcggctggcagcataaccgcgaacaagccaacctgaactcacgcaccgaggaaactattaaattcgccgcagcacactataataccgagatcttgaagtccattgataatgagtggcgaaagacccagtgcatgccgcgtgaggtatgcatcgacgtgggtaaagaatttggcgttgcaaccaatacttttttcaaaccaccttgcgtgagcgtgtaccgttgcggcggttgttgtaattctgagggtctgcagtgcatgaatacctcaacgtcttacctgagcaaaaccctattcgagatcaccgttcctttgagccagggcccgaagccagttacgatctcctttgcgaatcatacctcctgccgttgcatgagcaagctcgatgtttatcgccaggttcactcgattatacggcgcagtctgccagccacattacctcagtgccaggctgcgaacaaaacctgccctacaaattacatgtggaataatcacatttgccgctgtctggcgcaggaggactttatgttttcgagcgacgccggtgacgattccaccgacggttttcacgatatttgtggccctaataaggagctggacgaagagacatgtcagtgtgtatgccgcgccggactgcgccctgcctcctgcggacctcacaaggagttagatcgtaattcttgtcagtgcgtttgtaaaaacaagttgttcccaagccagtgcggggcgaaccgcgagtttgatgagaacacctgccaatgtgtttgtaagcggacctgcccgcgcaaccaaccactgaaccctgggaaatgcgcttgcgagtgtaccgaaagccctcagaaatgcctgctgaagggcaagaaatttcatcaccaaacgtgtagctgttaccgccgaccatgcaccaaccggcagaaagcctgtgagcctggcttcagctacagcgaagaagtttgcaggtgcgttccaagctattggaagcggccacagatgatgagc

SEQ ID NO: 20970 - DNA, 1260 bp, synthetic construct
  misc_feature 1..1260: note = source = /note="Description of Artificial Sequence: Synthetic coding sequence"
  source 1..1260: mol_type = other DNA
atgcatctcctgggatttttctcagtggcttgttcgctgctggctgcagcgctgctgcctggtccacgagaggcccctgcagcagccgccgcatttgagtcaggcctcgacctgtccgatgcggaaccggatgctggtgaggcaaccgcgtacgcttccaaagatctggaggagcaactgcggtcggtgtccagcgtggatgaacttatgaccgtgctctaccctgaatactggaagatgtacaagtgccagctgcggaagggaggatggcaacataaccgggaacaggcaaatctgaattcgagaactgaagagactattaagttcgcagctgcacattacaacactgagattctgaaaagcattgacaatgagtggcggaaaacccagtgtatgcccagagaggtgtgtatcgatgtggggaaggagtttggagtggcgacgaacacctttttcaagcccccctgtgtgtcggtgtacaggtgtgggggctgctgtaactcagaaggtctgcaatgtatgaataccagcacgtcctacctttcaaaaacgctctttgaaatcactgtgccactttctcagggaccaaagcctgtcaccatttcgttcgcaaaccacacttcgtgcagatgcatgtcaaagttggatgtgtaccggcaagtgcactccatcattaggagaagcctgcccgccaccctgccccaatgtcaagccgctaacaaaacctgtcctacgaactacatgtggaacaaccatatttgcagatgtcttgcccaagaggatttcatgttctcgagcgacgcaggagatgattcgactgatggatttcacgacatttgcggtcccaacaaagagctcgatgaggagacgtgtcaatgcgtgtgtagggcaggcctcaggcctgcatcctgtggaccacataaggagctggacagaaactcctgtcaatgcgtttgcaaaaacaagttgtttccttctcaatgcggggccaaccgcgaatttgacgaaaatacctgccagtgtgtgtgcaagagaacctgtccgagaaatcagcctctcaaccccggtaagtgtgcatgtgaatgtactgaaagccctcaaaagtgcctgcttaagggcaagaaattccatcaccaaacctgttcgtgttaccgtagaccttgtacgaatagacaaaaggcctgtgaacctggatttagctactcggaggaagtctgcaggtgtgtcccctcctactggaagcggcctcagatgatgtcc

SEQ ID NO: 20971 - DNA, 1260 bp, synthetic construct
  misc_feature 1..1260: note = source = /note="Description of Artificial Sequence: Synthetic coding sequence"
  source 1..1260: mol_type = other DNA
atgcacctgctcggcttcttttctgtggcctgctccctgctagctgcagctctgcttcctggaccccgggaggctcccgccgcggcagcggcctttgaatccggccttgacctgagcgacgctgaacccgacgccggcgaagccacagcctacgcgagcaaagatctggaagagcagctgaggtccgtttctagcgtggacgagctgatgacagtgctctatccagagtactggaaaatgtacaaatgtcagcttcggaaaggggggtggcagcataacagggaacaggcaaatctgaattccagaacggaggaaactataaaattcgccgccgctcactacaacaccgagatcctcaagtctatagataacgagtggcgcaaaacccagtgtatgccacgcgaggtctgcatagatgtgggaaaagagtttggagtggctaccaataccttctttaaaccaccatgcgtcagcgtttaccggtgtgggggctgctgcaatagtgagggtctacaatgcatgaataccagtactagctacctctccaagaccttattcgagattactgtccctctcagtcagggtccaaagcccgtgacgatctccttcgccaatcatacatcttgcagatgtatgtctaagctggatgtgtataggcaagtgcactccattatcaggcgatcccttcccgccaccctgccacagtgccaggcagctaacaaaacgtgcccaaccaactatatgtggaacaatcacatctgtcggtgtctggctcaggaagatttcatgttttcctccgacgcaggtgatgacagtactgatggcttccacgacatctgcggtcctaataaggaattggatgaggaaacatgtcaatgcgtgtgccgggccggcttgcggcctgcttcctgtggcccacataaagaactcgaccggaatagctgtcagtgcgtctgtaagaataaactgttcccctcacaatgcggggccaatcgcgagttcgatgagaacacgtgtcagtgcgtctgcaagcggacttgtccccgtaatcagccacttaatccgggaaagtgcgcttgcgaatgtaccgagtcccctcagaagtgcctactgaagggaaaaaagttccatcaccagacttgcagctgctatagacggccatgtaccaacaggcagaaggcttgtgagcccgggttcagttactccgaagaggtgtgcaggtgcgtgccgagttattggaaacgaccccagatgatgtca

SEQ ID NO: 20972 - DNA, 1260 bp, synthetic construct
  misc_feature 1..1260: note = source = /note="Description of Artificial Sequence: Synthetic coding sequence"
  source 1..1260: mol_type = other DNA
atgcacctgttgggcttcttttcagtggcgtgttctctgctggccgccgccttgctgccgggtccgagagaagcaccggctgcagcagccgcgtttgaatcgggacttgacctctcggatgccgagcccgatgcaggcgaggccactgcgtacgcctccaaggacctggaagagcagctgcggtcagtgtcatcggtggacgaactgatgaccgtcctgtaccctgaatactggaagatgtacaaatgccagctcaggaaggggggctggcagcataaccgggagcaggccaacctgaattcaagaactgaagaaaccatcaagttcgccgccgcccactacaatactgaaatcctcaaaagcattgataacgagtggcgtaagactcagtgcatgccgagagaagtgtgcattgacgtgggaaaagaattcggagtggcgaccaatacgtttttcaagccgccttgcgtgagcgtgtaccggtgcggaggttgctgcaattcggaaggactgcagtgcatgaacacgtccacttcatacctgtccaaaactctcttcgagatcaccgtgccactgtcccaaggcccaaagccggtgaccatctccttcgcgaaccatacttcgtgcaggtgtatgtcgaagctcgacgtctaccgccaagtgcacagcatcatccggagaagcctcccggccaccctgccgcaatgccaagcggccaacaagacttgcccaactaattacatgtggaataaccatatctgcagatgtctggctcaggaagatttcatgttttccagcgacgccggagatgactccactgacgggtttcacgatatctgcggcccgaacaaagagttggatgaggagacttgccagtgcgtgtgcagggcaggactcagaccggccagctgtggcccacataaggagctggaccgcaattcatgccaatgtgtctgcaagaataagctcttcccgtcacagtgcggggcaaacagggaatttgatgaaaacacctgccagtgtgtgtgtaagcgcacttgccccaggaatcaaccgctcaacccgggtaagtgcgcgtgcgagtgcaccgaatcaccgcagaagtgcttgctgaagggaaagaagtttcaccaccaaacctgctcgtgttacaggcggccctgcaccaatagacagaaagcgtgtgaacctggattctcatactccgaggaggtgtgccgctgtgtcccaagctactggaagcggcctcagatgatgtcc

SEQ ID NO: 20973 - DNA, 1260 bp, synthetic construct
  misc_feature 1..1260: note = source = /note="Description of Artificial Sequence: Synthetic coding sequence"
  source 1..1260: mol_type = other DNA
atgcacctgcttgggtttttctctgtggcatgtagccttcttgctgcagctctgctgccagggcccagggaggccccagcagccgccgccgcctttgagagcggactggatctgagtgacgctgagcccgacgcaggtgaggctacagcctatgcttctaaggacttggaggagcaactcaggtctgtgagcagtgtcgatgaactgatgactgtattgtacccggagtactggaagatgtacaagtgccagctgcggaagggcggatggcagcataatcgggaacaggccaaccttaactcaaggaccgaagaaaccatcaaatttgccgccgctcactataacactgaaattctcaaaagcatcgacaacgaatggaggaagactcaatgcatgccgagagaagtgtgtatcgatgttgggaaggaattcggtgtagccacgaatacattctttaagcccccctgcgtcagcgtataccgatgcgggggttgctgtaactccgaagggctgcagtgcatgaacaccagcactagctacctgagtaagacacttttcgagataacagttcctctgtctcagggcccgaagccggtgacaatctcattcgctaaccatacctcttgtaggtgtatgagcaaactggacgtttataggcaggtgcactcaatcatccgacgcagtcttccggccactctgccgcagtgccaggctgcaaacaaaacatgtcccacaaactatatgtggaacaatcacatctgtagatgccttgctcaggaagacttcatgttctcttccgacgctggggacgactccacagatggtttccatgatatttgtgggcctaataaggagctggacgaagagacttgtcaatgtgtttgtagagctggtctcagaccggcctcttgcggaccacacaaggagctcgataggaattcctgccagtgcgtgtgcaagaataagctgttcccgagccagtgcggggccaatcgcgaattcgacgagaatacttgccagtgcgtgtgcaagcgaacttgtcccagaaatcagcccctgaaccccggaaaatgtgcgtgtgaatgcacagaatcacctcagaaatgcctgctgaagggcaaaaagtttcaccatcagacctgctcctgttatagaagaccctgtaccaacaggcagaaggcctgcgaacccggtttcagctatagcgaagaggtatgtcggtgtgttccaagttactggaaaaggcctcagatgatgtct

SEQ ID NO: 20974 - DNA, 1260 bp, synthetic construct
  misc_feature 1..1260: note = source = /note="Description of Artificial Sequence: Synthetic coding sequence"
  source 1..1260: mol_type = other DNA
atgcatttactaggttttttttcggtagcgtgttcgttattagcggcggcgctattaccgggtccgcgtgaagcgccggcggcggcggcggcgtttgaatcgggtctagatctatcggatgcggaaccggatgcgggtgaagcgacggcgtatgcgtcgaaagatttagaagaacaattacgatcggtatcgtcggttgatgaattaatgacggtattatatccggaatattggaaaatgtataaatgtcaactacgtaaaggtggttggcaacataatcgagaacaagcgaatttaaattcgcgaacggaagaaacgataaaatttgcggcggcgcattataatacggaaatattaaaatcgatagataatgaatggcgaaaaacgcaatgtatgccgcgtgaagtatgtatagatgttggtaaagaatttggtgtagcgacgaatacgttttttaaaccgccgtgtgtatcggtttatcgttgtggtggttgttgtaattcggaaggtctacaatgtatgaatacgtcgacgtcgtatctatcgaaaacgttatttgaaataacggttccgttatcgcaaggtccgaaaccggtaacgatatcgtttgcgaatcatacgtcgtgtcgatgtatgtcgaaattagatgtatatcgtcaagtacattcgataatacgtcgttcgttaccggcgacgttaccgcaatgtcaagcggcgaataaaacgtgtccgacgaattatatgtggaataatcatatatgtcgttgtctagcgcaagaagattttatgttttcgtcggatgcgggtgatgattcgacggatggttttcatgatatatgtggtccgaataaagaactagatgaagaaacgtgtcaatgtgtttgtcgtgcgggtttacgtccggcgtcgtgtggtccgcataaagaattagatcgtaattcgtgtcaatgtgtatgtaaaaataaactatttccgtcgcaatgtggtgcgaatcgtgaatttgatgaaaatacgtgtcaatgtgtttgtaaacgaacgtgtccgcgaaatcaaccgttaaatccgggtaaatgtgcgtgtgaatgtacggaatcgccgcaaaaatgtttactaaaaggtaaaaaatttcatcatcaaacgtgttcgtgttatcgacgaccgtgtacgaatcgacaaaaagcgtgtgaaccgggtttttcgtattcggaagaagtttgtcgatgtgtaccgtcgtattggaaacgaccgcaaatgatgtcg

SEQ ID NO: 20975 - DNA, 1260 bp, synthetic construct
  misc_feature 1..1260: note = source = /note="Description of Artificial Sequence: Synthetic coding sequence"
  source 1..1260: mol_type = other DNA
atgcatctgttaggcttcttctcagtagcttgctccctgcttgccgctgcccttctccccggcccccgcgaggcgcccgctgcggcagccgcatttgagtctggacttgatctgtccgatgctgaacccgacgccggggaggccaccgcctatgccagcaaggatttagaagaacagttgcgaagcgttagtagcgtcgacgagctgatgacagtactgtacccagagtactggaaaatgtataaatgtcaactgaggaagggaggctggcagcacaatcgagagcaggcgaatctgaattcccgtacggaggagacaattaagttcgctgctgcacactacaacacagagatactcaagagcattgacaatgaatggagaaaaactcagtgcatgcctagagaggtgtgtatcgacgtgggcaaggagtttggcgtcgctactaatacttttttcaaacccccatgtgtgtccgtctacagatgtggcgggtgttgcaactctgagggcctacagtgtatgaatacctccacttcctatctttcgaaaactctcttcgaaattactgtgcccctgtcacaaggacccaaaccggtgacaataagttttgccaaccacactagttgccgctgcatgtccaaactggatgtttaccgccaggtgcattcaataatccggagaagtctgcccgcgactctcccacagtgtcaggcagctaataaaacatgcccaacgaactacatgtggaacaaccacatttgccgttgcttagcccaggaggacttcatgttctcctccgacgctggcgatgactccacagacggatttcatgatatttgtgggcccaacaaggagctggatgaggagacctgccagtgcgtttgtagggccggcctgcgtcccgcctcctgcggccctcacaaagagctagatcgtaatagctgccagtgcgtttgtaaaaacaaactatttccctcccaatgcggtgcgaatagggagtttgatgaaaacacctgccagtgtgtctgcaaacgtacgtgcccccggaatcagcctttgaatccgggtaagtgcgcctgcgaatgtacagagtcaccccaaaagtgtctgttgaaggggaaaaagtttcaccatcaaacctgcagttgttataggcgcccgtgtacaaaccgccagaaagcctgcgaaccagggttttcctacagcgaggaagtgtgtcgatgtgtcccctcttattggaagcgccctcagatgatgtcc

SEQ ID NO: 20976 - DNA, 1260 bp, synthetic construct
  misc_feature 1..1260: note = source = /note="Description of Artificial Sequence: Synthetic coding sequence"
  source 1..1260: mol_type = other DNA
atgcatttattggggtttttctctgtggcgtgttctttgttagccgccgcccttctgccaggacccagggaggcgcctgccgccgctgctgcgtttgagtccggtttggatttgagcgatgctgagccggacgccggcgaggccacggcttacgctagcaaggacctcgaagagcagctgcgcagtgtttcctcagtcgacgaacttatgacggtcctgtaccctgaatattggaaaatgtataagtgtcagttgcggaagggagggtggcaacataaccgcgagcaggctaacctgaattccaggaccgaagagacaatcaagttcgcagccgctcactacaataccgaaattctcaaatccattgacaatgagtggcggaagacacaatgtatgccacgcgaggtgtgcatcgacgttggtaaggagttcggggtagctactaatacctttttcaagccaccttgcgtttccgtttacaggtgcggaggatgctgtaattcagagggcctgcagtgtatgaatacctctacttcttatctcagcaaaactctgttcgagattacggtgccgctctcacagggacccaagccagttactatttcttttgccaaccacaccagctgccgctgtatgtcaaagctggatgtgtacagacaggtacatagcataatccgcaggtcacttccggcaactcttcctcaatgccaggcagccaacaagacgtgtccaactaactacatgtggaataatcacatatgtaggtgtctggctcaggaagactttatgttttcctcagacgccggtgacgatagcactgacgggtttcacgatatctgcggccctaataaagaattggatgaggagacctgtcagtgtgtgtgcagggctggattgcggcctgctagctgcggtcctcacaaagagctggatcggaactcttgccagtgcgtgtgtaagaataaactattcccttcccaatgtggcgccaacagagagtttgatgaaaacacctgccagtgcgtctgcaagaggacatgccctagaaaccaacctctcaatcccggcaaatgtgcgtgcgagtgcacggagagccctcaaaaatgcctcctgaagggaaagaagtttcatcaccaaacatgttcctgttatcggcgcccatgtacgaatcgacagaaggcctgcgagcccggcttctcctattcagaagaagtgtgcaggtgcgtcccaagttattggaaacggccccagatgatgagc

SEQ ID NO: 20977 - DNA, 1260 bp, synthetic construct
  misc_feature 1..1260: note = source = /note="Description of Artificial Sequence: Synthetic coding sequence"
  source 1..1260: mol_type = other DNA
atgcatctgctgggattcttttcggtcgcgtgctcactcctggccgccgctctgctcccgggaccacgcgaagcccctgccgccgccgcagcctttgagtcagggctggacctctcggatgcagaaccggatgccggtgaagcgacggcgtacgcttccaaagacctcgaggagcagctgcggtccgtctcgtctgtggacgagctgatgaccgttctctacccagaatattggaagatgtacaagtgccagctgcggaaggggggctggcagcacaatcgggagcaagcgaatcttaattcgagaaccgaggaaactatcaagttcgccgcagcacattacaatactgagatccttaagtcaattgataacgaatggagaaagacccaatgcatgcctcgggaagtgtgcatcgatgtgggtaaggagttcggagtcgctacgaatactttcttcaagcctccctgtgtgtcggtgtaccgctgcggagggtgttgtaattccgaaggtctgcaatgcatgaacacctccacctcttatctgtccaaaaccctcttcgaaatcactgtcccactgtcacagggcccaaaaccggtgactatctcattcgctaatcacacgtcgtgcaggtgtatgagcaagctggacgtttaccggcaggtccattcgattatcagacggagcctgccggccacgctcccgcagtgccaggccgcaaacaagacctgcccgaccaactacatgtggaacaatcatatttgtagatgcctggcacaggaggactttatgttctcatcggacgcgggggatgactctactgatggctttcacgacatctgcgggccaaacaaagagcttgatgaagaaacctgccaatgcgtgtgccgcgctggcctccggccggctagctgcggaccgcacaaggagctggacagaaattcctgccagtgcgtgtgcaagaacaagctgttcccttcgcagtgcggagctaacagagaattcgacgaaaatacctgtcagtgtgtgtgtaaaagaacttgcccgcggaaccaaccactgaatccgggaaagtgcgcttgcgaatgcactgagtcgccacaaaagtgtttgttgaagggaaagaaattccatcatcagacttgttcatgctacagacggccatgcactaaccgccaaaaagcgtgcgaaccgggattttcgtactccgaggaggtgtgtcgttgtgtgccgagctactggaaacgacctcagatgatgtcg

SEQ ID NO: 20978 - DNA, 1260 bp, synthetic construct
  misc_feature 1..1260: note = source = /note="Description of Artificial Sequence: Synthetic coding sequence"
  source 1..1260: mol_type = other DNA
atgcatctcctgggctttttcagcgtagcatgttcgctccttgcagcagcgctcctgccgggacccagagaggcgcctgctgcagcggcagcctttgaatcaggtcttgatctgtcggatgcggaaccggatgccggagaggcgaccgcatacgcatcgaaagacctggaagaacagctgcgttccgtctcgtcagtggatgagctgatgaccgtgctgtatcctgagtactggaagatgtacaaatgccaacttcgcaagggtggttggcaacataaccgagagcaggcaaatcttaactcgagaactgaagaaactatcaagtttgccgcagcgcactacaataccgagattcttaaaagcattgacaacgaatggaggaaaacccagtgcatgcctagagaagtgtgtatcgatgtcgggaaagaatttggtgtggcaaccaatacctttttcaagcctccctgtgtctcggtctaccgatgcggcggttgctgcaatagcgaaggtctgcagtgcatgaacacgtcgacttcatacctttcaaagaccctgtttgaaattactgtgccgctctcccaaggaccgaagccggtgaccatctcctttgcgaatcacacgtcgtgtaggtgtatgtccaagctcgacgtgtaccggcaggtccatagcataatcagacgttcgcttccagcaacccttccacaatgtcaagcggcaaacaaaacctgcccaaccaactacatgtggaacaaccacatttgtagatgtcttgcacaagaggactttatgtttagctcggatgctggagatgattcgaccgatggtttccatgatatttgtggaccaaacaaagaactggatgaagagacttgtcagtgcgtctgtagagcaggccttcggcccgcatcgtgcggtccgcataaggagctggatcgaaatagctgtcaatgcgtgtgcaaaaacaagctgtttcctagtcaatgtggagcaaaccgagaattcgatgaaaatacctgtcaatgtgtgtgtaaacggacttgcccacggaaccagcctctgaaccctgggaagtgtgcatgcgagtgtactgagtcaccacagaaatgccttcttaagggaaaaaagtttcatcatcagacgtgctcatgttaccgccgcccttgtacgaatcgccaaaaggcatgcgaacccggattctcctactcggaagaagtgtgcaggtgtgttccttcatactggaaacgccctcagatgatgtcc

SEQ ID NO: 20979 - DNA, 1260 bp, synthetic construct
  misc_feature 1..1260: note = source = /note="Description of Artificial Sequence: Synthetic coding sequence"
  source 1..1260: mol_type = other DNA
atgcacctgctgggattcttttccgtagcctgttcactactggcagccgcgctactgccaggacccagagaagcacccgccgcggccgctgcctttgaatctggactggacctgtcggatgccgagccagacgccggcgaagccacagcttacgcatccaaggatctcgaggagcaacttaggtccgtaagctccgttgacgaactaatgaccgtgctctaccccgagtactggaaaatgtataaatgccagctccgaaagggggggtggcagcacaacagggaacaagctaacctgaacagcaggacagaggagactatcaagtttgcggccgctcattataatactgagattcttaagagcattgataacgaatggcgcaagacgcagtgcatgccacgggaggtgtgcatcgacgtgggcaaggagtttggcgtcgccacaaatactttttttaagccaccgtgtgttagcgtgtatcgatgtggcggctgttgcaattcagaagggctccagtgtatgaatacaagcacgtcttacctcagcaaaacactcttcgaaatcaccgttcccctgtctcagggccccaagcctgtcacgatttcctttgcaaatcacacaagctgtaggtgcatgtcaaaattggatgtgtatcgccaagtccacagcattatcagaagatctctaccagcaacactgcctcaatgccaggcggctaataagacctgtccaactaactacatgtggaacaatcatatctgtcggtgtctggctcaggaggatttcatgtttagttccgacgctggagacgacagcacggacggcttccacgacatctgtgggcctaacaaagaactggatgaagagacatgccaatgtgtatgtcgggctggcctgcgtcccgcatcgtgtggcccacacaaggagcttgataggaattcctgccagtgcgtttgtaaaaacaaactcttcccgtctcaatgtggtgctaaccgtgaatttgacgagaacacttgtcagtgcgtgtgcaagcggacgtgtccaaggaatcagcccctgaatcccggtaagtgcgcctgcgagtgcacagagagccctcagaagtgtctactcaaggggaagaaattccatcaccagacatgttcctgctatcgccgcccatgcactaacagacaaaaggcttgcgaacccgggttttcgtatagcgaggaggtctgtcgctgtgttccatcttattggaaaagaccacaaatgatgtcc

SEQ ID NO: 20980 - DNA, 1260 bp, synthetic construct
  misc_feature 1..1260: note = source = /note="Description of Artificial Sequence: Synthetic coding sequence"
  source 1..1260: mol_type = other DNA
atgcatctgctaggattcttcagcgtcgcctgtagcctactggccgcggctctcctgcccggaccccgggaagctcccgccgccgcagctgctttcgagtctggcctagacctgagcgatgccgaacccgacgctggcgaagcaacggcctatgcttctaaagatcttgaagagcaacttcgctctgtgagtagcgtggatgagttgatgaccgtgttgtaccctgaatactggaagatgtataaatgccaactgaggaagggaggttggcaacacaaccgggaacaggccaacctcaactctagaacagaggagaccataaagtttgccgctgcacattacaacactgagattctgaagtccatagacaacgaatggagaaaaacacagtgcatgccgcgggaggtgtgtattgatgtgggtaaagagttcggggtggccaccaacactttttttaaaccaccgtgtgtttctgtgtaccgttgcggagggtgctgcaatagcgagggtctgcagtgcatgaacacctcaacttcctatctttccaaaacgctcttcgagatcaccgtcccactatcgcagggtccaaaacccgtgacgatatccttcgctaatcacacttcttgccgatgcatgtccaagctggatgtttaccggcaggtgcacagtatcataaggaggtcattgcccgctactctccctcagtgtcaagccgcgaataagacgtgcccgaccaactacatgtggaacaaccacatttgcagatgcttggcccaggaggatttcatgttttcctcagacgcaggcgatgattccacagacggcttccacgacatttgtggcccgaataaagagctcgacgaagagacatgtcagtgcgtttgtcgagccggcctgcgacccgcaagttgcggtccacacaaggagttagaccggaactcttgccagtgcgtatgcaaaaataaactctttccatcacagtgcggggccaatagggagtttgatgaaaacacgtgccagtgtgtctgtaagcgtacgtgcccacgaaatcaacctctgaacccaggcaagtgcgcctgcgaatgtaccgagagcccccagaagtgtctattgaagggtaaaaaattccaccatcagacatgttcctgttaccgcaggccatgtaccaaccgccagaaggcctgcgagccagggtttagttactcagaagaagtgtgtagatgtgtgccttcttattggaagcggccacaaatgatgagc

SEQ ID NO: 20981 - DNA, 1260 bp, synthetic construct
  misc_feature 1..1260: note = source = /note="Description of Artificial Sequence: Synthetic coding sequence"
  source 1..1260: mol_type = other DNA
atgcatctgctgggattcttctcagtcgcatgttcactcctcgctgccgctctactacctgggccacgcgaagcaccagccgctgccgccgcattcgagagtggtctcgacttgtccgacgccgagcctgatgctggagaagctaccgcttacgctagtaaggacttggaagaacaactgcgatctgtgtcatccgtagacgagttgatgacggttctgtacccagaatactggaagatgtacaagtgccagcttcgaaaagggggatggcagcacaacagagagcaggcaaatttgaattcaagaactgaggagaccattaagtttgcagccgctcactataatacggaaatccttaagtccatcgacaacgaatggcgtaagactcagtgtatgccccgcgaggtatgcattgatgtgggcaaagagtttggcgtcgccacaaacactttttttaaacccccctgcgtgagcgtgtaccggtgcgggggatgttgtaactcagagggattacagtgcatgaacacttccacttcctatttgtccaaaactctcttcgagataacagtgcctctcagtcaggggccaaaacccgtcaccatctccttcgctaaccatacttcttgcaggtgtatgtctaaattagacgtgtaccgacaggtccactccatcatcaggagatctctacctgccaccctgccccagtgccaggcagctaacaagacttgtcccacaaattacatgtggaacaatcacatatgcagatgtctggctcaggaagattttatgttctcgtccgacgctggagatgactccaccgacggttttcatgacatatgcgggcctaataaagagcttgacgaggagacatgtcagtgcgtttgcagggccggtttaagacctgctagttgtggtccccacaaggagcttgacaggaattcttgtcagtgcgtgtgcaaaaacaagctgttcccctcccagtgtggtgccaaccgggagttcgatgaaaatacatgccagtgtgtttgtaagaggacgtgcccaagaaaccagcccctaaaccccggaaagtgcgcatgcgagtgcacagaatctccccagaagtgtttattgaaaggtaagaagttccaccatcagacctgcagctgctaccgcagaccctgcacaaatcgccaaaaggcctgtgaaccggggttcagttactcagaagaggtgtgcagatgcgtcccgtcttactggaagcggccacagatgatgagc

SEQ ID NO: 20982 - DNA, 1260 bp, synthetic construct
  misc_feature 1..1260: note = source = /note="Description of Artificial Sequence: Synthetic coding sequence"
  source 1..1260: mol_type = other DNA
atgcacctactaggtttctttagcgtggcatgcagcctcctcgccgccgccctccttcccgggcctcgggaagctcccgccgcggccgccgccttcgaatccggactcgatctgagcgatgccgaacctgacgccggcgaggctactgcctatgcttccaaggacttagaggaacagctcaggtccgtttcctccgtcgacgaacttatgacggtgctgtaccccgagtattggaaaatgtataaatgccagctgagaaaaggtgggtggcagcataaccgagagcaagctaatctgaattctcgcaccgaggaaacaataaaatttgcggccgcccattacaatacggagatactgaagtcaatcgacaacgagtggcgtaaaacgcaatgcatgccccgcgaggtgtgtatagatgttggtaaagagtttggcgttgctactaacaccttcttcaaaccaccctgcgtgtccgtgtataggtgtggcgggtgttgtaacagcgaggggctgcagtgtatgaatactagtactagttatcttagcaagacactctttgagataactgtacccttgtctcaggggccgaaacctgtaacaatctcatttgctaaccacacctcatgccggtgcatgagcaagctggacgtgtaccgccaggtgcactcaatcattaggcggagtctgccagccacacttccacaatgccaggccgcaaacaaaacctgtcccaccaattatatgtggaataatcacatatgccgatgcctggcgcaggaagactttatgttcagctcagatgcaggcgacgactcgaccgatggctttcacgacatatgcgggcctaacaaggagttagacgaggagacctgccagtgcgtatgcagggcgggcctcagaccagcttcctgcggccctcataaggaactggacagaaactcctgccagtgcgtgtgcaaaaataagctctttccgtcacagtgtggcgcaaaccgagaattcgacgaaaacacttgccagtgtgtgtgcaagaggacttgcccccgcaatcagccactgaaccctggcaaatgtgcctgtgagtgtacagagtcacctcagaagtgtttgctcaagggaaaaaaatttcaccatcaaacttgttcttgctacagaagaccttgtaccaatcgccagaaggcctgtgaacctggctttagctactccgaagaggtgtgtaggtgcgtgcccagttactggaaaagaccccagatgatgagc

SEQ ID NO: 20983 - DNA, 1260 bp, synthetic construct
  misc_feature 1..1260: note = source = /note="Description of Artificial Sequence: Synthetic coding sequence"
  source 1..1260: mol_type = other DNA
atgcacctgctggggttcttttccgtggcatgcagcctcctggcagccgctttgcttcctggaccacgcgaggcgccagcggctgcggcagcgtttgaaagtggtttggacttgtcggatgcagaaccagatgccggggaggccaccgcgtatgcatcgaaggatctggaagagcaactgaggtcggtgtcgagcgtggacgaactgatgactgtgctttaccctgaatactggaagatgtacaagtgccagctcagaaagggcggctggcaacataaccgcgagcaggctaaccttaactcacgcactgaggaaactattaagttcgctgcagcacactacaatactgaaattcttaaaagtatagataacgaatggcgtaagacccaatgcatgcctcgtgaagtttgcatcgatgtgggcaaggagttcggagtggcaactaatacgttctttaagccaccgtgtgttagcgtgtacagatgtgggggttgttgcaattcagagggcctgcaatgcatgaacacttcgacctcctacctctcgaaaacccttttcgaaattaccgtcccactgtctcaaggtccgaagcccgtgacgatatcctttgcaaatcatacctcgtgtcgatgtatgtccaagctcgacgtctacaggcaagtccattccatcattagacgctcgctccctgcaacgcttccacaatgtcaggcagccaacaaaacttgcccaaccaactacatgtggaataatcacatttgcaggtgtcttgcccaagaagatttcatgttttcatcagatgcgggcgatgatagcacggacggttttcacgatatctgtggacctaacaaggagctggacgaagaaacttgtcagtgtgtatgtcgcgcgggacttcgaccggcttcctgcgggcctcataaggagctggatcggaatagttgtcaatgcgtgtgtaagaacaaacttttcccgagccagtgcggagccaaccgggagttcgacgagaacacctgccagtgtgtctgcaagagaacttgccccaggaatcagccactcaatcctggtaagtgtgcatgtgaatgtactgaatctcctcagaaatgcctccttaaaggaaaaaagtttcatcatcagacctgctcgtgctacagacgtccttgtactaaccgacagaaggcgtgtgagcctggattttcctatagcgaagaagtctgtcggtgtgtgccctcctactggaaaaggccccaaatgatgtca

SEQ ID NO: 20984 - DNA, 1260 bp, synthetic construct
  misc_feature 1..1260: note = source = /note="Description of Artificial Sequence: Synthetic coding sequence"
  source 1..1260: mol_type = other DNA
atgcacctgctgggcttcttctctgtggcctgctcactgctggcggctgctttactacccggacctcgcgaggctccggccgcagcggccgcgttcgagtcgggactcgacctgtccgacgctgaaccggacgctggtgaggctaccgcatatgcttcgaaagacttagaagagcagctgcggtctgttagtagtgtggatgagttaatgacagtgttatacccagagtactggaaaatgtacaagtgtcagctccggaaaggtggatggcaacacaacagagagcaggcgaatttaaatagccggaccgaggaaacgatcaaattcgctgccgcgcactacaataccgaaatactcaagtccattgacaacgagtggcgcaaaacgcaatgcatgcctcgcgaagtctgcatcgacgtgggcaaagagttcggagtcgcaactaacacctttttcaagccaccttgcgtcagcgtgtacaggtgcgggggatgttgtaactctgagggtctccaatgcatgaatacctctacgagttacctgtccaagacactctttgagatcaccgtccctttaagtcaaggcccaaagccagtcacgatctccttcgctaaccacacctcgtgccgatgcatgagtaagctcgatgtgtaccgccaggtgcacagtataatcaggcggtcgctgcctgccactcttccacaatgccaagcagccaacaagacatgccctaccaattacatgtggaataatcacatctgcaggtgcctcgcgcaagaggattttatgttctcttctgatgccggtgacgattctaccgacggtttccatgatatttgcggtcccaacaaagaacttgacgaggaaacatgtcagtgcgtgtgcagggccggcctacgccccgcttcttgcggtccacataaggaactggatcggaattcctgtcagtgtgtgtgcaaaaataagctgtttcccagtcagtgcggtgctaaccgcgagttcgacgaaaacacctgccagtgtgtctgtaagaggacctgcccccggaatcaaccactgaaccctggtaagtgtgcctgtgagtgcacagaaagcccccagaagtgcctgctgaagggaaagaaattccaccatcagacatgctcctgctaccgccgaccctgtaccaaccgacagaaggcttgtgaacccgggtttagttactccgaggaagtttgcaggtgtgtaccctcatactggaagcggccccagatgatgagc

SEQ ID NO: 20985 - DNA, 1260 bp, synthetic construct
  misc_feature 1..1260: note = source = /note="Description of Artificial Sequence: Synthetic coding sequence"
  source 1..1260: mol_type = other DNA
atgcacctgttaggcttcttttctgtcgcgtgtagtcttttggcggctgcactcctgcctgggccccgggaggctcccgctgcagccgcagcgtttgagtcgggcttggacctttccgacgctgaacctgatgctggggaagccacagcttacgcgtccaaggatctggaagagcagctgcggtctgtgtcttcggttgatgagcttatgaccgttttgtaccctgagtactggaagatgtacaagtgtcaattaagaaaggggggctggcaacacaaccgggaacaggcaaatctcaattcgcgtaccgaggaaaccatcaagtttgctgccgcacattacaacacggagatcctgaagagtattgacaatgaatggcgaaagacacagtgcatgcccagagaagtgtgcatagacgtcgggaaggagtttggagtggcaaccaacactttttttaaaccaccatgcgtaagtgtttaccgctgcggcggatgctgtaattccgaaggcctccaatgtatgaatacctctacatcttacctttccaagaccctctttgagatcaccgtgccacttagccaaggccctaagccggtgacgatatccttcgccaatcacacctcttgccgctgtatgtctaagcttgacgtgtatcgccaggtgcactctattattcgccgcagtttaccagccacactaccacagtgtcaggcggccaacaaaacgtgccctaccaactacatgtggaataatcacatctgccggtgtctcgcccaagaagacttcatgttctcttcagacgccggtgacgactctactgacgggtttcacgatatctgcggacccaacaaggagctcgacgaggaaacctgtcagtgcgtttgtcgggccgggcttcgtccagccagctgtggcccacataaagaattggaccggaatagttgtcagtgcgtctgcaaaaataagctcttcccttcacagtgtggagcaaaccgtgaatttgacgagaatacgtgccaatgcgtgtgcaaacgtacttgcccaagaaaccagcccctgaacccaggaaaatgtgcgtgcgagtgtacagagagcccccagaagtgtttgttaaaggggaaaaagtttcaccaccagacctgctcttgttataggcggccatgcaccaatcgtcaaaaggcctgcgagcccggctttagctactccgaggaggtgtgccggtgcgtgcctagctactggaaacgaccacagatgatgagc

SEQ ID NO: 20986 - DNA, 1260 bp, synthetic construct
  misc_feature 1..1260: note = source = /note="Description of Artificial Sequence: Synthetic coding sequence"
  source 1..1260: mol_type = other DNA
atgcacctactgggattcttttccgtggcttgttctttgctggctgccgccttgctccctggacctcgggaagcgccagcagctgcggctgcatttgagagcggtctggacttaagtgacgccgagccggatgcaggagaagccacagcttacgcctctaaggatttggaggaacaattgagaagcgtatcatctgtcgatgagcttatgaccgttctttaccccgagtactggaagatgtataagtgccaacttcgcaaggggggttggcagcacaatcgggaacaggcaaatctgaactctcgcacagaagagacaataaagttcgctgccgcacattacaacactgagattctgaaaagtatagataacgagtggcgaaagactcagtgcatgccaagagaggtctgcattgacgtgggaaaggagttcggggttgctaccaacacattttttaagcctccctgcgtgagcgtgtatcgctgtggaggatgttgtaacagcgaaggtcttcagtgtatgaacacaagcaccagctatttgtcgaagaccctatttgagataacggtgccactatcccaggggcctaagcccgtgaccataagttttgcaaaccacaccagctgtagatgtatgtctaagctggatgtatacaggcaagtacatagtatcatccgaaggtctctgcctgccaccttgccccagtgccaagcagctaataagacctgccccaccaattacatgtggaacaaccacatttgtagatgcttggcacaggaagactttatgttttcctctgatgcaggggatgattccacagacggcttccacgatatctgtggccctaacaaagaacttgatgaagagacttgtcagtgcgtttgcagagccggccttaggcccgcatcctgtggcccgcataaagagctggacagaaacagctgtcagtgtgtgtgtaagaataaattgtttccgtctcagtgtggggctaatcgagaattcgacgagaacacgtgccagtgcgtgtgcaaaaggacttgtccaagaaatcaacctctgaaccctgggaaatgtgcttgcgagtgtacagaatccccccagaagtgccttctgaaaggaaagaagtttcatcaccaaacttgtagctgttatcggcggccctgcaccaatcggcagaaggcctgcgagcctgggttctcatatagtgaggaagtatgcaggtgtgtcccttcttactggaagcggccccagatgatgagt

SEQ ID NO: 20987 - DNA, 1260 bp, synthetic construct
  misc_feature 1..1260: note = source = /note="Description of Artificial Sequence: Synthetic coding sequence"
  source 1..1260: mol_type = other DNA
atgcatttgctgggctttttttccgttgcctgttcgctgctcgcagctgccctgctgccaggcccgcgggaagcaccagctgccgccgctgcttttgagtccggcttggacctttctgacgccgaaccagacgctggcgaagctacggcttacgcctctaaagatctggaagaacagctgcggtcagtgtctagtgttgacgagctcatgactgttctctacccagaatactggaaaatgtacaaatgccaattgagaaagggcggatggcagcataatagggagcaggccaacttaaactcaagaactgaagaaactataaagttcgccgctgcccattacaacactgaaattctaaaatccatcgacaacgaatggaggaaaacccagtgcatgcccagagaggtttgtattgatgtgggtaaagaattcggtgtcgctacaaatacatttttcaaacccccgtgtgtatcagtgtatagatgcggcggctgctgtaactcagagggcttgcagtgtatgaatacgagtaccagctacctgtccaagactctgttcgaaatcacagtacctctgtctcaagggccgaaacccgtcacgatcagctttgctaaccacactagctgccgttgtatgagtaagctcgatgtgtacaggcaggtacactccatcattcggcggagcctgcctgcgaccctgccccagtgccaggcggcaaataagacttgccccacaaattacatgtggaataaccacatatgcagatgcctggcacaggaagacttcatgttcagctctgatgctggggatgattccacagatgggtttcatgatatatgcgggccaaataaggagctcgatgaagagacgtgtcagtgcgtttgtcgagcgggtctgcgccctgcctcttgtggcccgcataaggagctggatcgcaactcttgccagtgtgtttgcaagaataaactgttccccagtcagtgtggcgctaatcgggagtttgacgaaaatacatgccaatgcgtgtgtaaacgtacctgccctagaaatcagccactgaaccccggtaagtgtgcttgcgagtgtaccgagagtccacaaaaatgcttgctaaaaggcaagaagtttcaccaccagacttgttcatgctacaggaggccctgcacgaataggcagaaggcctgcgagcctggcttttcttactccgaagaggtgtgtcgatgcgttcccagttactggaaacgaccacaaatgatgagc

SEQ ID NO: 20988 - DNA, 1260 bp, synthetic construct
  misc_feature 1..1260: note = source = /note="Description of Artificial Sequence: Synthetic coding sequence"
  source 1..1260: mol_type = other DNA
atgcacttgctgggcttctttagcgtcgcctgctctctgctcgcagcagccctactgcctggtcccagagaggccccagctgcagcagccgcctttgagagcggactggatttatctgacgcggaaccagacgctggcgaagcaacagcctacgccagcaaagacctggaggaacaactgagatcagtctctagtgtcgacgaactcatgaccgtgttgtaccccgagtattggaagatgtataaatgccagctgaggaaaggcggctggcaacacaaccgagaacaagcgaatttgaatagccgtacagaggaaaccattaagtttgccgctgcgcactacaatactgagatcctcaagtctattgacaacgaatggcggaaaacccagtgtatgcctcgcgaggtctgtattgacgtcgggaaggagttcggtgtcgcaacaaatactttctttaaacccccctgtgtgtccgtttatcgctgtggaggatgctgcaactcggagggactgcagtgtatgaacacctctacttcctacctgagtaaaacactatttgagataactgtgccactctctcagggacccaaacctgtgaccatatctttcgctaatcatactagctgcaggtgtatgtctaagttagacgtgtatcggcaggtccactcaatcatcaggcgctctctgcccgcgacacttccccagtgccaggcagcaaacaaaacctgtcccaccaactacatgtggaacaaccatatatgcagatgcttggcccaagaggacttcatgttcagtagtgacgccggcgatgactcgaccgacgggttccatgatatctgcggcccaaataaggaattggacgaggagacatgccagtgtgtctgccgtgctggactgcgtccggcctcctgtggccctcataaggaacttgaccgaaatagctgccagtgcgtgtgtaagaacaaactgttcccttctcagtgcggggccaatagggagtttgatgaaaacacctgccagtgtgtctgtaagaggacatgtcccaggaatcagcctttgaatccaggaaaatgtgcctgcgagtgcacagagtcgccccagaagtgcctgcttaagggaaaaaaatttcaccatcagacttgctcgtgttatagaaggccgtgtactaaccggcagaaggcctgtgagcccggcttcagctacagtgaagaggtgtgcaggtgtgtgcccagctactggaagaggccacagatgatgtct

SEQ ID NO: 20989 - DNA, 1260 bp, synthetic construct
  misc_feature 1..1260: note = source = /note="Description of Artificial Sequence: Synthetic coding sequence"
  source 1..1260: mol_type = other DNA
atgcatctcttgggattcttcagcgtggcatgctcactgctggcggctgccttgctgccagggccgagagaagcgcccgcggctgcagctgcattcgagtcgggtctggacctgtccgacgccgagccagatgctggagaggcaaccgcatatgcttccaaggatctggaggagcaactgcggagcgtgagctcagttgatgaactcatgaccgtcctgtacccggaatactggaagatgtacaaatgccagctgcggaaagggggatggcagcacaaccgcgagcaagccaatctgaactcgcgcactgaagaaaccatcaagttcgctgctgcccactacaatactgagatcctgaagtcaatcgacaacgaatggcggaaaacccagtgtatgccgcgtgaagtgtgtatcgatgtggggaaggagttcggagtggctaccaacaccttctttaagcctccctgcgtgagcgtgtaccgctgtggcggatgctgtaactcggaggggctccagtgtatgaataccagcacttcctacttgtctaagaccttgttcgagatcacggtgccactttctcaaggaccaaaaccggtcaccatctcctttgcaaaccacacttcgtgccggtgtatgagcaaattggacgtgtaccggcaggtgcactcgattattcgccggtccctccctgccaccctgccacaatgccaggcagcgaataagacctgccctactaactacatgtggaacaatcatatctgccgctgtttggcccaagaagatttcatgttttcatcggatgcgggcgacgactcgactgatggattccatgacatctgcgggccgaacaaggaactcgatgaagaaacttgccagtgtgtgtgccgggcgggtctgcgcccagcgtcgtgcggtccccataaagaactggatcgcaattcctgccaatgcgtctgcaagaataagctcttcccctcgcagtgtggagcgaacagagaatttgacgagaatacgtgccagtgcgtttgcaaaaggacctgccccaggaatcagccgctgaacccaggaaagtgcgcgtgtgaatgcactgaatcccctcagaagtgtctgcttaagggaaagaagttccaccatcagacctgcagctgctatcgccggccgtgcactaaccgacaaaaagcgtgcgagccagggtttagctactcagaggaagtctgccgctgcgtgccatcatactggaaacggccgcagatgatgtcc

SEQ ID NO: 20990 - DNA, 1260 bp, synthetic construct
  misc_feature 1..1260: note = source = /note="Description of Artificial Sequence: Synthetic coding sequence"
  source 1..1260: mol_type = other DNA
atgcacctgctgggattcttctccgtcgcatgctcgctgcttgctgcggccctgctgccggggcctcgggaagcaccagcggcggcggcggccttcgagagcgggctcgatctgtcggatgcagagccggacgccggagaagcaactgcctacgcgtcgaaagacctggaggagcagctccggtccgtgtcctccgtcgacgaactgatgaccgtgttgtacccagaatactggaagatgtataagtgccagctccggaagggaggatggcagcataaccgggaacaggccaacctgaactcccggacggaagagacgatcaaatttgccgctgcgcattacaatacggagatccttaagagcattgacaatgagtggcgcaagacgcaatgcatgccacgggaggtgtgcatcgacgtgggaaaggaattcggagtggcgaccaacactttcttcaaacccccgtgcgtgtccgtgtatcgctgcgggggatgctgtaactcggaaggcctgcagtgcatgaacacttcaactagctacctgtcaaagactcttttcgagatcaccgtgccgcttagccaagggccgaaaccagtcactatctcatttgctaaccatacttcctgccggtgtatgtcgaagctggacgtgtaccgtcaagttcactccatcatccgcagaagcctgccagcaactctccctcagtgtcaggccgccaacaagacctgcccgaccaactacatgtggaataatcacatctgccgctgtttggcccaggaggacttcatgttctcgtcagatgctggtgatgattcgaccgacggattccatgacatctgtggcccgaataaggagttggacgaggagacttgtcagtgcgtctgcagagccggcctgcgccctgcaagctgtggaccgcacaaggaattggatcgaaactcatgccagtgcgtctgtaaaaacaaactgtttccgtcccagtgtggagcaaaccgagagttcgatgaaaatacctgtcagtgtgtgtgtaagcggacctgcccgcgaaaccaacctctcaacccaggaaagtgcgcgtgcgagtgcaccgaatcgccgcagaaatgtctgctgaaaggaaagaagttccaccaccagacgtgctcttgctacagacggccctgcactaaccgccaaaaagcctgcgaaccaggattttcgtactccgaagaagtgtgccgctgcgtgccttcctactggaaacggccgcaaatgatgagc

SEQ ID NO: 20991 - DNA, 1260 bp, synthetic construct
  misc_feature 1..1260: note = source = /note="Description of Artificial Sequence: Synthetic coding sequence"
  source 1..1260: mol_type = other DNA
atgcatcttctcggctttttctcagtggcatgctcgcttctggccgcagcactgcttccaggtcctcgggaggcacctgccgcggctgctgcgtttgaatccggactggatctctccgatgcagaaccagacgcaggtgaagccaccgcatacgcctcgaaggaccttgaagaacagctccgttcggtgtccagcgtcgatgagctgatgactgtgctctaccccgagtactggaagatgtataagtgccaacttagaaagggaggatggcaacataatcgcgaacaggcaaatctcaatagccgcacggaagagacgattaagttcgccgccgcacattacaatactgaaattctgaagtcgattgataacgaatggcggaaaacccagtgcatgcctagagaggtctgtattgatgtgggaaaggaatttggggtggccaccaacactttcttcaagcctccctgtgtctccgtgtaccgttgcggggggtgctgcaactcggaaggactgcagtgcatgaacacttcgacttcgtacttgagcaagactctttttgaaatcacggtcccattgtcgcaaggtccaaaaccagtgaccatcagcttcgcaaatcatacgtcgtgcagatgtatgtcaaagctcgacgtgtaccggcaagtgcattcgattattcgtcgttcactccctgcaactctgccccagtgccaggcagcgaacaagacctgtcccactaattacatgtggaacaaccatatctgcaggtgccttgcacaggaagatttcatgttttcgagtgatgcgggtgacgactcgaccgacggctttcacgatatctgtggccccaacaaggaactggacgaggaaacctgtcagtgtgtctgccgtgcaggacttcggcctgcctcctgtgggccacacaaggaacttgaccggaattcgtgccagtgtgtttgtaagaacaaactttttccgtctcaatgtggtgcaaacagggaatttgatgagaacacctgtcaatgcgtgtgtaagcggacctgtccacgcaaccagcctcttaaccctggtaagtgcgcgtgtgaatgtaccgaatctccccagaagtgcctgctgaaggggaaaaagttccaccaccaaacctgttcctgttaccggcgcccttgcaccaacaggcaaaaagcatgtgaaccgggattttcgtactcggaagaagtctgccgatgcgtgccttcatactggaagcgaccacagatgatgagc

SEQ ID NO: 20992 - DNA, 1260 bp, synthetic construct
  misc_feature 1..1260: note = source = /note="Description of Artificial Sequence: Synthetic coding sequence"
  source 1..1260: mol_type = other DNA
atgcatcttctgggatttttttctgtggcatgctctcttctggccgctgccctgctgccgggacccagagaggcccccgccgccgctgccgcatttgagtctggcctcgatctgtctgatgccgagccagatgctggcgaagctacagcctacgcctctaaggaccttgaagaacaactgaggagtgtatcaagtgtggacgagctgatgactgtcctttatcctgagtactggaagatgtacaagtgtcaactccgcaagggggggtggcaacacaaccgcgaacaagccaacttgaacagtcggaccgaggagacaatcaaattcgctgccgctcactacaacaccgagattctcaaatctatcgacaatgagtggagaaagacccagtgcatgcccagagaggtttgcatcgacgtaggaaaggaatttggcgtggccactaacactttctttaaaccaccttgcgtgtcagtttaccggtgcgggggttgctgcaatagcgaggggctgcagtgcatgaacacgtcaaccagttacctgtccaagactcttttcgagattactgtccccctgtcccagggccccaaacctgtaactatcagcttcgccaatcacacatcctgccgctgcatgtcaaaactcgacgtgtaccgccaggtgcacagcataattaggagatctctgcctgccaccctgcctcagtgtcaggctgccaataaaacctgcccgacaaattatatgtggaacaatcacatctgcaggtgtctcgcccaggaggattttatgttctcttctgatgccggggacgactctacagatggcttccacgatatctgcgggcctaacaaggaactggatgaagagacatgtcaatgtgtctgccgcgctggcctgagaccagcgtcctgtggtcctcacaaggaactggatcggaattcctgccagtgtgtgtgcaagaacaaactgtttcccagtcagtgcggagcgaacagggaatttgacgaaaacacatgccagtgcgtctgtaagcggacgtgcccacgcaaccagcccttgaatcccggaaagtgtgcatgcgagtgcaccgaatccccacaaaaatgtcttctcaagggcaagaaatttcatcatcagacatgcagctgctatcggcgaccttgtacaaacagacaaaaggcttgtgagcccgggttctcatactccgaggaggtgtgcagatgtgtgcccagctactggaagaggccgcagatgatgagt

SEQ ID NO: 20993 - DNA, 1260 bp, synthetic construct; identical to SEQ ID NO: 20950
  misc_feature 1..1260: note = source = /note="Description of Artificial Sequence: Synthetic coding sequence"
  source 1..1260: mol_type = other DNA

SEQ ID NO: 20994 - DNA, 1260 bp, synthetic construct
  misc_feature 1..1260: note = source = /note="Description of Artificial Sequence: Synthetic coding sequence"
  source 1..1260: mol_type = other DNA
atgcacctactaggctttttttctgtggcctgctccttgcttgccgcagccctgcttccaggcccacgcgaggcgcccgccgccgcagccgcattcgaatcgggactggatttgagcgacgccgaacccgacgcaggtgaagccacggcgtacgcttctaaggacctcgaggagcagctccgaagtgtgtcgtctgtggatgagctcatgaccgttctatacccagaatattggaagatgtataagtgccaactgcggaagggaggctggcagcacaacagagaacaagcaaatttgaacagtcgtacagaggagacgatcaagttcgccgccgcccactacaacaccgagattttgaaatccatcgataacgaatggcgcaagactcagtgtatgccacgcgaggtgtgcattgatgtcggcaaagagtttggtgtggccacaaacactttcttcaagccaccgtgtgtctccgtgtatcgctgcggcggctgctgcaatagcgagggactacagtgcatgaacacgagcacaagttacctgtcgaagacactgtttgagatcacggtcccgttaagtcagggacctaagccggttacaatcagtttcgccaaccacacctcatgtagatgcatgagtaagctggacgtgtacagacaggtccattcgattatccgccgttcacttcccgcgacgttgccacagtgccaagcggccaacaagacctgtccgaccaattacatgtggaacaaccatatctgccggtgcctggctcaggaagatttcatgttttcctccgacgcgggcgatgactcaaccgatggatttcatgatatctgcggcccaaataaggagctagatgaggagacatgccagtgtgtttgcagggccggcctccgtcccgctagctgcggacctcataaggaacttgaccgtaattcctgtcagtgtgtatgcaagaacaagttgtttcccagccagtgcggcgccaatcgtgaatttgatgagaacacctgtcagtgcgtatgcaagcgcacttgcccacgtaaccagcctctgaatcccgggaagtgtgcgtgcgagtgcaccgaatcaccccagaagtgcttgctgaagggcaagaagttccaccaccagacgtgctcctgctaccgtcgtccgtgcactaaccgccagaaagcctgcgagccgggtttcagttactctgaggaagtatgccggtgcgtcccctcgtactggaagcgcccccagatgatgagt

SEQ ID NO: 20995 - DNA, 1260 bp, synthetic construct
  misc_feature 1..1260: note = source = /note="Description of Artificial Sequence: Synthetic coding sequence"
  source 1..1260: mol_type = other DNA
atgcatcttttgggattctttagcgtcgcatgtagcctgttggcagctgcactcctgcccggaccccgggaggcccccgccgcagccgcagcctttgaaagtgggctagatttatcggatgcggagcctgatgcaggagaggccaccgcctatgcttctaaagatctcgaggaacagcttcggtctgtgtctagtgtggatgagcttatgacagtgctgtacccagagtactggaaaatgtacaaatgtcaattgcggaaggggggatggcagcataacagagagcaggcgaatttgaactccagaactgaagaaacaattaaattcgctgcggcgcattacaataccgagatccttaagtctattgacaacgagtggaggaagacccagtgcatgcccagggaagtgtgcattgatgtcggcaaagaattcggagtcgctactaataccttttttaaacccccatgcgtgtcagtgtatcgctgtggcgggtgctgtaacagcgagggactgcagtgtatgaacacatctacctcctaccttagcaagaccttgttcgaaatcacagtaccgcttagtcagggcccaaaaccagtgactatcagtttcgcgaaccatacttcttgtcgctgcatgtccaagcttgacgtgtaccgccaggtccactccatcattcggaggagccttcctgctacactgccccagtgccaggcggcaaataagacatgccccacaaattacatgtggaacaatcatatatgccgatgtctcgctcaggaggactttatgttcagctcagacgctggcgatgatagcacagacggattccacgatatctgcgggccaaataaggagctggatgaggagacctgtcagtgtgtgtgtagagcaggcctgcgccctgcctcctgtggcccccataaagagctagatagaaactcttgccagtgtgtgtgtaagaacaagttgttcccctctcagtgtggcgccaaccgggagtttgatgagaacacttgccagtgtgtgtgtaagcgcacctgccctcggaaccagcctctgaaccctggaaaatgcgcttgtgaatgcaccgagtcgccacaaaagtgcttgctgaaaggaaaaaaattccatcaccagacatgctcgtgctacagacggccttgtacgaatcgacagaaggcttgcgagccggggttcagctactctgaggaagtgtgtaggtgcgtgccgtcatactggaaacggcctcaaatgatgtct

SEQ ID NO: 20996 - DNA, 1260 bp, synthetic construct
  misc_feature 1..1260: note = source = /note="Description of Artificial Sequence: Synthetic coding sequence"
  source 1..1260: mol_type = other DNA
atgcacttgttgggttttttctcagtcgcctgctcgttgctggcagctgctctactccccggccctagagaggccccagccgctgccgccgcattcgaaagtggactcgatctgtcagacgcagaacctgatgccggagaggcgactgcatacgcatcaaaagacctcgaagaacagttgaggtccgtttcatctgtggatgagttgatgactgttttataccccgagtactggaagatgtacaaatgccagttgaggaaagggggatggcagcataaccgtgagcaggccaacttgaattcgaggacagaagagactatcaaattcgctgccgctcattataatactgaaattcttaagagtattgataacgaatggagaaaaacccaatgcatgccgagggaggtttgcatcgacgttggtaaagaatttggtgttgccactaatacgttcttcaagccaccatgtgtgtccgtttatcgatgcggggggtgttgtaactccgaaggattacagtgtatgaatacctctacatcatatctgtctaagacgctatttgaaatcaccgtaccattaagccaaggtcctaagccagttactatcagctttgcaaaccacacaagttgtcgctgtatgagtaaattggacgtctataggcaagtacattccattattcggaggagtttacccgcaaccttgcctcaatgccaagcggcaaataaaacctgtccaacgaactatatgtggaataatcacatttgtcgatgcttagcccaagaagactttatgttctcatctgacgccggggacgatagtaccgatgggttccacgatatctgcggaccaaacaaggagttggatgaagagacctgtcaatgtgtttgtagagctggtctcagacctgccagttgcggtcctcataaggaattggatcgcaattcatgtcaatgcgtgtgcaaaaacaagctctttccttcacaatgtggggcaaacagggagttcgatgaaaatacctgccaatgcgtgtgcaaaaggacctgtccgaggaaccagccactaaatcccggtaagtgcgcttgtgagtgcactgaaagcccgcaaaagtgtctacttaaaggcaaaaagttccatcaccaaacctgctcatgctacaggagaccatgtacgaaccgacaaaaggcatgcgagcctggcttttcctattcagaagaggtttgtcgctgtgtgccatcctactggaagagaccacaaatgatgtct

SEQ ID NO: 20997 - DNA, 1260 bp, synthetic construct
  misc_feature 1..1260: note = source = /note="Description of Artificial Sequence: Synthetic coding sequence"
  source 1..1260: mol_type = other DNA
atgcatctgttgggcttcttctccgtggcatgttcattgctggccgcggctctgcttcctgggccaagagaggcccccgctgccgctgcggcattcgaaagcggtcttgacttgagcgacgccgagccagatgccggggaagctacggcttacgcttccaaggacttagaagagcagctaaggtcggtctcctcggttgacgagttgatgacggtactatacccagaatattggaaaatgtacaaatgtcagctccggaagggcggatggcagcacaaccgcgagcaggccaatctgaactcacgaacagaggaaactattaaatttgctgccgctcactataacacagaaatcttgaagtccattgataacgagtggagaaaaacccagtgtatgcctcgtgaggtttgcattgacgttggcaaagagttcggagtggctaccaacaccttcttcaaacctccctgcgtgagtgtgtaccgatgtggggggtgctgtaactccgagggcctgcagtgtatgaatacatctacaagctacctgagtaaaacactatttgaaattaccgtccccttgtcccagggcccgaagccggtgacaattagctttgcaaatcatacatcctgtcggtgcatgtccaaattggacgtctataggcaggttcactccatcatcaggcggtctctgccagccactttaccacagtgccaagcagccaataaaacatgcccaactaactacatgtggaacaatcatatttgcagatgtttggcccaggaggactttatgttttcatccgatgcgggcgatgattccactgatggctttcacgatatttgcggacctaacaaggagctggacgaggaaacatgtcaatgtgtctgtagggcaggcttgcgccccgcgtcctgcggtccacacaaggagctagacaggaatagttgccaatgcgtgtgtaaaaataaactgttcccaagtcagtgcggagccaacagggaattcgacgagaacacatgccaatgcgtatgtaaaaggacctgcccaaggaaccagcctctgaaccccgggaagtgtgcctgtgagtgtaccgagtctccgcagaagtgtttgctgaaaggaaaaaagttccaccaccagacttgtagctgctaccggcgcccttgcaccaatcggcaaaaggcttgtgaacccgggttcagttatagcgaggaggtttgtagatgcgtgccgtcctattggaagaggcctcagatgatgtct

SEQ ID NO: 20998 - DNA, 1260 bp, synthetic construct
  misc_feature 1..1260: note = source = /note="Description of Artificial Sequence: Synthetic coding sequence"
  source 1..1260: mol_type = other DNA
atgcacctcctcggattcttttcggtcgcttgctccctccttgcagccgcgcttcttccggggcctagagaagcaccagccgccgcagccgcttttgagtcaggacttgatctcagcgacgctgaacctgacgcgggggaagccactgcatacgcatccaaggacctcgaagaacaactcaggtccgtgtcaagcgtggatgaacttatgactgtgttgtacccggagtactggaagatgtacaaatgccaactccgcaagggcggatggcagcacaatcgggagcaggcaaacctgaactcgcgtacggaagaaaccatcaagtttgctgcagcgcattacaataccgagattctgaagagcatagacaacgaatggcgtaaaacccagtgtatgccgcgtgaggtctgtattgacgtgggaaaggaatttggggtggcaactaatactttctttaagccgccctgcgtgtctgtgtaccggtgtggaggctgttgcaactcagaaggtttgcaatgtatgaacacctccacctcatacctgtcgaaaactctctttgaaatcactgtccccctgtcgcaaggtcccaagcctgttaccatctccttcgctaatcatacttcctgtcgttgtatgtcgaagttggacgtgtaccggcaggttcactcgattattcgtcgctcgctgccagcaactcttcctcagtgccaagccgccaacaaaacctgtccgacgaactatatgtggaacaaccatatttgtagatgcttggcacaagaagatttcatgtttagctcggatgctggtgacgattcaacggatggtttccatgatatctgtggtccaaataaggagctggatgaagagacttgccaatgtgtgtgccgcgcgggcctgaggccagcaagctgtgggcctcacaaggagcttgatcgcaactcgtgtcagtgtgtctgcaagaataagctgttcccttcgcaatgtggagccaacagggagttcgatgaaaatacgtgtcagtgcgtgtgtaagcggacctgcccacgcaaccagcctctgaatcccggcaaatgtgcatgcgaatgtaccgaaagcccccagaagtgcctgctgaagggcaagaagtttcatcatcaaacttgctcgtgttaccggcggccctgtactaacagacaaaaagcatgtgaacctgggtttagctattccgaagaggtgtgtcggtgtgtcccttcctactggaaaagaccgcagatgatgtca

SEQ ID NO: 20999 - DNA, 1260 bp, synthetic construct
  misc_feature 1..1260: note = source = /note="Description of Artificial Sequence: Synthetic coding sequence"
  source 1..1260: mol_type = other DNA
atgcacctgctgggatttttctcggtggcatgctcgctgctggccgcggcgctgctgccgggcccgagggaggctccggcagctgcagcagcattcgaatcaggtctggatctctcggacgccgaacccgacgccggagaagcaactgcatacgcctccaaggacctggaggaacagctgagaagcgtgtcgagcgtcgatgaattgatgactgtgctttaccctgagtactggaagatgtacaagtgccagctgcgcaagggcggatggcaacataacagagagcaggccaacctgaacagccggacggaagagactatcaagtttgcagcagcgcattacaacacggagatcctgaagtcgatcgacaacgaatggcgcaagacccagtgcatgccacgcgaagtctgcatcgatgtcggcaaggagtttggtgtggcaaccaatactttcttcaagcccccctgcgtgtcagtctacaggtgcggcggctgctgtaactccgaaggactgcagtgcatgaacacctcaacgtcgtatctttcgaaaaccctgttcgaaatcacggtgccgctctcccaaggacctaagccggtgaccatctccttcgccaaccatacctcatgtcggtgcatgagcaaactggacgtgtacaggcaggtgcactccatcatccgcaggtccctgccagcaactctgccgcaatgccaggccgcgaacaaaacttgcccgactaactacatgtggaataatcatatttgccgctgcctcgcccaagaggacttcatgttctcatccgacgccggcgacgactcgaccgatgggttccacgacatttgcggacccaacaaagaactggacgaagaaacttgccagtgcgtctgccgcgcgggcctccggcctgcatcttgtgggccccataaggagctggatcggaactcgtgccagtgtgtctgtaaaaacaagctgtttccgtcccagtgcggagccaacagagagttcgacgaaaacacctgccagtgcgtgtgcaagagaacttgtccgcgcaatcagccgctcaatccgggcaagtgcgcctgcgaatgcactgaaagcccacaaaagtgcctcctgaaaggcaagaaatttcatcatcagacctgttcctgctaccggcggccgtgcaccaatagacaaaaggcatgtgaacctggattctcatattccgaggaggtgtgccggtgcgtgccatcatactggaagcgcccgcaaatgatgtca

SEQ ID NO: 21000 - DNA, 1260 bp, synthetic construct
  misc_feature 1..1260: note = source = /note="Description of Artificial Sequence: Synthetic coding sequence"
  source 1..1260: mol_type = other DNA
atgcacttacttggattcttctcagttgcttgtagcttgctagcagctgctttattgccgggacctagagaagcgccagcagctgccgctgcatttgaatctgggcttgatttgtcagatgctgagccagatgctggcgaagcaactgcttatgcatcaaaggacttagaggaacaactcagatcagtgagttcggtcgatgaacttatgaccgtgctttatccggagtattggaaaatgtacaaatgccaactacgaaaaggaggctggcaacacaatcgggaacaggctaacctgaactctcgaactgaggaaacaataaaatttgccgcggcccattacaatactgagattttgaagtcaattgataacgaatggcgaaaaacgcagtgcatgcctcgtgaggtatgcatagatgtgggaaaagaatttggagtcgccacaaacaccttttttaagccaccttgcgtgtcagtatatagatgtggaggttgctgcaactcggaaggactccaatgcatgaatacatctacatcgtatctcagcaagactttgtttgaaattactgtaccattatctcagggtccaaaacctgttactattagttttgcgaaccatacatcgtgccgatgtatgtcaaaacttgatgtttaccgacaggttcactctattataagacgttcactacccgctacacttccacagtgccaagcggccaataaaacgtgcccaacgaactacatgtggaacaatcatatttgtcgctgcttggcccaggaagattttatgttctcctcagatgcaggtgatgacagtactgatggttttcacgacatttgcggcccgaataaggaacttgatgaagagacttgtcaatgcgtgtgccgggcaggtctacgtccagctagttgcggaccacataaagagctcgatcgtaactcttgccagtgtgtttgtaaaaataaactatttccttcacaatgcggtgcaaatcgagaatttgacgagaatacctgtcaatgcgtttgtaaacggacatgcccacgcaaccagccgcttaatccaggaaagtgtgcatgcgagtgcaccgaaagtccacaaaagtgcctgcttaagggaaagaaattccatcaccaaacttgttcttgttacagacgcccgtgtacgaaccgtcaaaaagcttgcgagcccggcttctcgtattctgaagaagtttgccgttgtgtcccatcctattggaaaagaccacaaatgatgtct

SEQ ID NO: 21001 - DNA, 1260 bp, synthetic construct
  misc_feature 1..1260: note = source = /note="Description of Artificial Sequence: Synthetic coding sequence"
  source 1..1260: mol_type = other DNA
atgcacctgttgggcttcttttccgttgcctgcagtcttctggcagccgcccttctgcccggccctcgagaggcacctgccgccgcagctgcgtttgagtctggtctggatctttccgatgctgagcccgacgccggtgaagctaccgcgtacgcatctaaggacctggaagagcaactgaggagcgttagcagtgttgatgagctgatgactgtgctgtacccggaatactggaagatgtacaagtgccagcttagaaaaggaggctggcagcataacagagaacaagccaatctgaatagccggacagaggagactattaagtttgcagcagcgcactataacacagaaattctgaagagcatcgacaacgagtggaggaaaactcagtgcatgccgcgcgaggtttgcattgacgtggggaaggagttcggagtggccaccaacacttttttcaaacccccctgtgtaagcgtctaccgctgcggtggctgttgcaactcagaggggctccaatgtatgaacaccagtacatcatacctctcaaaaaccctgttcgaaattacagtgcctctgtcacagggtcctaagcccgtcaccatttcctttgctaatcacaccagttgtcggtgcatgagcaaactcgacgtgtatcgccaggtgcactctattatccgccggagtctccctgctacactcccgcaatgccaagccgccaacaaaacatgccccactaattacatgtggaataatcacatatgtaggtgcttggcacaggaggactttatgttttccagtgatgctggggatgacagcaccgacggctttcacgatatatgtggaccgaataaagaactggacgaggaaacttgccagtgtgtctgtagggccgggctgcgccctgcctcctgcgggccccacaaagagctggacaggaactcctgccaatgtgtctgtaaaaataagctcttcccatcccagtgtggggctaaccgagaatttgacgagaatacctgccaatgcgtgtgcaaaagaacttgtccccggaatcaacctctgaaccctgggaagtgcgcctgtgaatgcaccgaatctccccaaaagtgtctgctgaagggcaagaaatttcaccaccagacctgtagttgctatcgacggccttgtaccaacagacagaaggcctgtgagcccgggttctcatactcagaagaggtctgcaggtgcgtgcccagttattggaaacgaccacagatgatgtcc

SEQ ID NO: 21002 - DNA, 1260 bp, synthetic construct
  misc_feature 1..1260: note = source = /note="Description of Artificial Sequence: Synthetic coding sequence"
  source 1..1260: mol_type = other DNA
atgcacctgctcggttttttttcggttgcctgcagtctacttgcggccgccctcctgccaggccctcgggaggcgcccgccgccgccgctgctttcgagtcaggcctggatctttctgacgcagagccagacgccggcgaagccaccgcctacgcgtccaaggatctggaggaacagcttcggagcgttagttcagtcgacgagcttatgacggtgctataccccgaatactggaagatgtacaagtgtcagttgcggaaaggcggctggcagcataacagggagcaggccaacctgaacagccgtacggaggaaaccatcaaatttgcggccgctcattacaacacggagatcttgaagtcaattgacaacgaatggcgcaagacacagtgtatgccccgcgaggtctgcatcgacgtgggtaaggagtttggcgttgccaccaacaccttcttcaagcctccttgcgtgtctgtctaccgatgcggtggttgttgtaattcggaagggctgcagtgtatgaacacttccacttcatatctcagcaagacactgttcgagatcacggtgccattgagccagggccctaagcccgtgaccatctcattcgctaaccatacctcttgccgctgtatgagcaagcttgacgtttaccgccaggtgcactcgattatccgccggagcctccctgccactctgcctcaatgccaagcggctaacaagacctgccccactaactatatgtggaacaaccacatttgtcgctgccttgcccaggaggatttcatgttctcttcggatgccggagacgattccaccgacggtttccatgatatctgcggccccaacaaggagctcgatgaagagacttgccagtgcgtgtgtcgggctggtcttcgccccgcatcatgcggcccccataaggagctcgaccgtaactcctgccagtgcgtatgcaagaacaaacttttcccctcccagtgcggcgcaaatcgtgaatttgatgaaaatacctgccagtgtgtctgcaaacgtacctgcccacgtaaccagcccctcaaccccggaaagtgtgcatgcgagtgtactgagagcccccagaagtgtctgttgaagggtaagaagtttcatcaccagacctgctcgtgctatcgcagaccttgcaccaataggcagaaggcgtgtgagccgggtttctcatacagcgaagaagtttgccgctgcgttccctcctattggaagagacctcagatgatgagc

SEQ ID NO: 21003 - DNA, 1260 bp, synthetic construct
  misc_feature 1..1260: note = source = /note="Description of Artificial Sequence: Synthetic coding sequence"
  source 1..1260: mol_type = other DNA
atgcatctgttgggctttttctcggtggcgtgttccctcctggctgcagcacttttgccgggacctcgcgaagcaccggccgctgcggcagcgttcgagtctggactggatctctcggacgctgagcccgatgcgggagaagcaaccgcttacgcttccaaagatctggaggaacaactccgatctgtgagcagcgtggacgaactgatgactgtgctgtacccggagtattggaagatgtacaaatgccagttgagaaagggtggctggcaacacaacagagaacaggcgaatctcaactcccggaccgaggaaaccatcaagtttgcagccgcgcactacaataccgagatcttgaaatcgatcgacaacgagtggaggaaaacgcagtgcatgccgcgcgaggtgtgcattgacgtcggaaaagagttcggggtggccactaacacgttcttcaagccgccatgcgtgtcggtctaccggtgcggagggtgctgcaactcagaagggctgcagtgtatgaataccagcactagttacctgtcgaaaactctgttcgagattaccgtccccctgtcgcagggccccaagcctgtgacgatctccttcgccaaccacacctcctgcaggtgcatgtcaaaattggatgtgtacagacaggtgcattcgatcatccgccgttctcttccagccactctgccccaatgccaggcagcaaataagacgtgtccgactaactacatgtggaacaatcatatttgccgctgtctggcacaagaagatttcatgttttcgtcggacgcaggcgacgattcaactgacgggttccacgacatttgcggaccgaacaaggaactcgatgaagaaacctgtcagtgcgtctgccgcgctggactccgcccggcatcctgcggccctcacaaggagcttgataggaactcgtgtcaatgcgtgtgcaagaataagttgttcccgagccagtgtggagcgaatcgggaattcgacgaaaacacgtgccaatgtgtatgtaagcgcacttgccctcggaaccaacctctgaaccctggtaagtgcgcctgcgagtgcaccgaatccccgcaaaaatgtctcctcaagggaaagaagtttcatcaccagacttgctcttgttacagaaggccgtgtaccaaccggcaaaaagcctgcgaaccaggattctcctactccgaggaggtgtgtcgctgcgtgccgtcctactggaagaggccacagatgatgtcc

SEQ ID NO: 21004 - DNA, 1260 bp, synthetic construct
  misc_feature 1..1260: note = source = /note="Description of Artificial Sequence: Synthetic coding sequence"
  source 1..1260: mol_type = other DNA
atgcatttactcggtttcttttcagtcgcttgttcactgttggccgcagcactgcttcctggccctcgcgaagcacctgctgctgccgccgcatttgagtcggggttggacctgagtgatgccgagccggacgccggggaggcgacagcatacgcctctaaggatctggaggagcaactgagaagtgtttctagtgtggacgagttaatgaccgtgctgtacccagagtactggaagatgtataagtgccaactgaggaagggaggttggcagcacaatcgcgagcaagctaacctgaactctaggaccgaggagacaataaagtttgccgcagctcattacaacaccgaaatactgaaatcaatcgacaacgagtggcgtaagactcagtgcatgcccagggaggtgtgcattgatgtgggtaaggaattcggagtcgccacaaatactttttttaagcccccctgtgtcagcgtgtacaggtgtgggggctgctgtaattccgagggactgcagtgtatgaacaccagcacatcatatttgagtaagacactgtttgaaataactgttcctttatcacaagggcctaagcccgttacaattagctttgctaaccatacatcctgcaggtgcatgtcaaagctggacgtgtaccgacaagtacacagcattattcggcgctccctgcccgccaccctgccacagtgccaagccgcaaacaagacctgccctaccaattacatgtggaacaaccatatatgccggtgcctggcccaggaagactttatgttctcctctgatgctggggatgattctactgacgggttccatgacatatgcggcccaaacaaggagctggatgaagagacctgccagtgcgtatgtcgggcaggcctgagacctgcctcatgtggaccccataaggagctggataggaattcttgtcaatgtgtgtgtaagaataaattgttcccatcacagtgcggggctaacagggaatttgacgaaaacacttgccagtgcgtgtgtaaaaggacttgtccccggaaccagcccctgaaccccgggaagtgcgcatgtgaatgtaccgaaagcccccaaaaatgtcttttaaaaggtaagaaatttcaccaccagacatgcagctgctacaggaggccatgcaccaaccgccagaaggcttgcgagcctggatttagctacagcgaggaggtctgtaggtgtgtacccagttattggaagcggcctcagatgatgtca

SEQ ID NO: 21005 - DNA, 1260 bp, synthetic construct
  misc_feature 1..1260: note = source = /note="Description of Artificial Sequence: Synthetic coding sequence"
  source 1..1260: mol_type = other DNA
atgcacctactaggcttcttttcagtggcttgctctctgctcgcggctgcactgctgcccgggcctcgtgaggcccccgccgctgcagcggccttcgagagcggactggatttgtccgacgccgagccagacgccggggaagcaaccgcatatgctagcaaggacctggaagagcagctgcggtcagtgtcatccgtggatgaattaatgaccgtgctgtaccctgaatattggaagatgtacaaatgccagttgcggaagggagggtggcagcacaacagagagcaggctaacttaaactctcgaacagaggagacgataaagtttgcagccgcgcattacaatactgaaattcttaagtctatcgacaatgagtggcggaagacacagtgtatgccacgcgaggtttgtattgatgtcgggaaggagttcggcgtggcgacgaatacattcttcaagcccccatgcgtgtctgtatataggtgtggcgggtgttgtaattctgaggggctgcagtgcatgaatacctccacatcgtacctttccaagactctattcgagattacggttccattgtcccagggaccaaagcccgtaaccatctcctttgccaatcatacatcctgccggtgcatgagtaaactcgatgtttacagacaggtacattccattataagaaggagcttgcctgctactctaccccagtgccaagcagccaataagacctgtcccactaactacatgtggaacaatcatatttgcagatgtctggcgcaggaggattttatgttttcatctgatgcaggggatgactccaccgacggatttcacgatatctgcggccctaacaaagaactggacgaggagacatgtcagtgtgtgtgtcgtgctgggttgcgccctgcttcatgcggtcctcataaggaactggacagaaattcctgccagtgcgtgtgcaagaataagctcttcccctcccaatgtggggccaaccgtgagtttgacgaaaacacctgtcagtgcgtgtgcaagaggacctgtccgcggaaccagccgctcaatcctggaaagtgtgcttgtgagtgtaccgaaagtccccagaagtgtctgctcaaaggcaagaaatttcaccaccagacttgttcctgctatcggcgcccctgtactaaccggcagaaagcatgcgaaccaggattctcttattctgaggaggtgtgcaggtgcgttccctcctattggaagcggccacaaatgatgagc

SEQ ID NO: 21006 - DNA, 1260 bp, synthetic construct
  misc_feature 1..1260: note = source = /note="Description of Artificial Sequence: Synthetic coding sequence"
  source 1..1260: mol_type = other DNA
atgcacctgctgggattcttttccgttgcttgcagtctcctggcagctgccctgcttcctggcccccgcgaagccccagcggcagcggctgcctttgagagcggtcttgacctctccgatgccgaacccgacgccggtgaggccactgcatacgccagcaaggacctggaggagcaacttcgctccgtatcctccgtggacgaactgatgacggtgctttaccccgagtattggaagatgtacaagtgccaacttcgcaaaggaggttggcagcacaacagggaacaggctaatctgaacagtaggacagaggagacgataaagtttgcagccgcgcactacaacactgaaatcctgaagagcattgacaatgagtggagaaagacgcagtgtatgccccgcgaggtatgtatcgacgtgggaaaggagtttggagtggccaccaataccttcttcaagcctccgtgcgtgtcagtctatcgctgtggcggatgctgcaactcagagggcctgcagtgcatgaacacttccaccagctacctctccaaaacactgttcgaaataacagtacctttgtcacagggccccaaaccagtaacaatcagtttcgccaaccacacaagctgccgctgcatgagcaagctggacgtttacagacaggtacatagcatcatacgccgcagtcttccggcgactctcccgcaatgtcaagctgccaacaaaacgtgccccacaaattacatgtggaacaaccacatctgccgctgtttggcccaggaagacttcatgttctcaagtgatgccggcgatgacagtactgacggtttccatgatatttgtggtcctaataaggaacttgacgaggagacgtgtcagtgcgtgtgtcgcgctggactcaggcctgcgtcatgcggccctcataaggagctcgacaggaactcatgtcaatgcgtctgtaaaaacaagctgtttccatcacaatgtggagcgaatcgcgagttcgatgagaacacgtgtcagtgcgtgtgcaagcgcacctgtccaaggaaccagccactgaacccaggcaaatgcgcatgcgagtgtacagaaagtccgcagaagtgcctgctgaagggcaagaagttccaccaccaaacctgcagctgctacagaagaccatgcaccaacagacagaaggcttgcgagcccggcttcagctactcagaggaagtgtgtagatgtgtcccctcttactggaagaggccccaaatgatgtca

SEQ ID NO: 21007 - DNA, 1260 bp, synthetic construct
  misc_feature 1..1260: note = source = /note="Description of Artificial Sequence: Synthetic coding sequence"
  source 1..1260: mol_type = other DNA
atgcacctcctgggatttttcagtgttgcttgttcattgcttgctgctgctctgctcccaggcccaagagaggcccccgccgctgccgctgcattcgaatcaggcctcgacctgagcgacgcagagccggatgcaggcgaggccaccgcctatgcttccaaggaccttgaagagcaactgaggtctgtctctagtgtggatgaactcatgaccgtgctttaccccgagtactggaagatgtacaaatgccaactccgcaaaggaggctggcagcacaacagggaacaagcaaaccttaattctaggaccgaagagacaatcaagtttgccgcggcacattacaacaccgaaattttgaagagcatcgataacgaatggaggaagacccagtgcatgcctagggaggtgtgcatcgatgtcgggaaagaatttggggttgcaacaaacacctttttcaaaccaccttgtgtgtcagtgtaccgttgcggggggtgctgcaactcggaaggattgcaatgtatgaacactagtacctcgtacttgagtaagactctctttgaaatcaccgttcctctgagccagggccctaaaccggtaacaatctcctttgccaatcacacaagttgtcgctgcatgtctaagctggatgtttatcgccaagtgcattcgatcatcaggaggagcctgccagctaccctcccacagtgccaagccgcaaacaaaacttgcccaacaaactacatgtggaataatcacatctgcagatgtctcgcacaggaggactttatgttctcgagtgacgcaggggatgacagcacagatggattccacgatatctgtggcccaaacaaagagcttgatgaagagacttgccagtgcgtgtgtcgagctggactcaggccggctagctgtggaccacataaagaacttgatcgcaactcatgccaatgtgtctgcaagaataaactttttccgagccagtgcggagccaatagagagtttgatgaaaacacttgtcagtgcgtgtgcaaaaggacatgtcctagaaaccagccacttaatccgggcaaatgcgcttgcgaatgcaccgagtcaccgcaaaagtgcctgctgaaaggaaaaaagttccatcaccagacttgctcgtgttacaggagaccatgcactaaccggcagaaagcgtgcgaacccggcttctcctacagtgaggaagtgtgccggtgcgtgccaagctactggaagcgccctcaaatgatgagc

SEQ ID NO: 21008 - DNA, 1260 bp, synthetic construct
  misc_feature 1..1260: note = source = /note="Description of Artificial Sequence: Synthetic coding sequence"
  source 1..1260: mol_type = other DNA
atgcatttacttggattttttagtgttgcttgttcacttttagcagctgctttgcttccaggaccaagagaagcaccagcagctgctgcagcttttgagtcaggattagatctttcagatgcagaaccagatgccggggaggctactgcttatgcatcgaaagatcttgaagaacaattacgaagtgtatcatcagttgatgaattaatgacagtactttatcctgaatattggaaaatgtataagtgtcaacttcgtaagggaggttggcaacataatagagaacaagctaatcttaattcaagaacagaagaaactattaagttcgcagcagctcattataatacagaaattttaaaatcaatagataatgaatggcgtaaaacacaatgtatgccaagagaagtttgtattgatgtaggtaaggaatttggagttgctacaaacacattttttaaaccaccttgtgtttccgtatatagatgtggtggatgttgtaattcagagggattgcaatgtatgaatacaagtacttcttatctttcaaaaacattatttgaaattacagttccattatcacaaggaccaaaaccagttactatttcttttgcaaatcatactagttgtagatgtatgtcaaagttagatgtttatagacaagttcattctataattagaagaagtcttccagctactttaccacaatgtcaagctgcaaataaaacatgtccaacaaattatatgtggaacaatcatatttgtagatgtcttgcacaagaagattttatgtttagtagtgatgcaggagatgattctacagacggattccatgatatatgtggacctaataaggaattagatgaagaaacatgtcaatgtgtttgtagagcaggattaagacctgcttcatgtggaccacataaagaacttgacagaaactcttgtcaatgtgtttgtaaaaataagcttttcccaagccaatgtggtgcaaatagagaattcgatgaaaatacttgtcaatgtgtttgtaaaagaacctgtccaagaaatcaaccacttaatccaggaaaatgtgcatgtgaatgcacagaaagtccacaaaaatgccttcttaaaggtaaaaaattccatcatcaaacttgctcttgttatagaagaccatgtacaaatagacaaaaagcatgtgaaccaggtttttcatattcagaagaagtttgtagatgtgttccatcatattggaagcgtccacaaatgatgagt

SEQ ID NO: 21009 - DNA, 1260 bp, synthetic construct
  misc_feature 1..1260: note = source = /note="Description of Artificial Sequence: Synthetic coding sequence"
  source 1..1260: mol_type = other DNA
atgcatcttcttggatttttctccgtggcatgttcgctccttgcggcagcactgttgccaggtcctcgcgaagcacccgccgcagccgccgccttcgagtcaggactcgacctgtcagatgcagaacctgatgcaggtgaagcgaccgcatacgcatcgaaagacctggaggagcaacttaggtcagtgtcgtccgttgatgagctgatgactgtgttgtaccctgaatactggaagatgtacaagtgtcagctgcggaaaggagggtggcagcacaacagggaacaagcaaacctgaattcccgtactgaagaaaccatcaaatttgcagcagcacactacaataccgagatacttaaatcaatcgataacgagtggcggaaaacgcaatgcatgccacgggaggtgtgcattgacgtcggaaaagaatttggtgtcgcaaccaacacctttttcaagccgccttgtgtgagcgtctaccggtgcggcggctgttgcaattccgaaggtctgcagtgtatgaacacctcgacttcctacctctcgaaaacgcttttcgagattaccgtcccactctcgcaaggcccgaaaccagtcactatatcgttcgcaaaccatactagctgtaggtgtatgtcaaagttggatgtgtacagacaagtgcattcgattattcggcgctccctcccagcaacgttgccccagtgccaggccgcgaataagacctgcccaactaactacatgtggaataaccacatctgtcgttgcctcgcacaggaagatttcatgttctcaagcgacgccggtgatgactcgactgatggatttcacgatatttgtggaccaaacaaagagcttgatgaggagacttgtcaatgtgtgtgtagagcaggacttcggccggcatcatgtggtcctcacaaggaactggacaggaactcttgccaatgtgtgtgcaagaacaaactgttcccatcccagtgtggcgctaaccgagagtttgacgagaacacctgtcaatgcgtgtgcaagcggacctgtcctagaaaccagcctctcaacccaggaaagtgtgcctgcgagtgtaccgaaagcccgcagaagtgtctcctgaaaggaaaaaagtttcaccatcaaacttgcagctgctacagacgtccgtgtaccaaccggcagaaggcctgtgagcctgggttttcgtacagcgaagaggtgtgccgatgtgtcccctcatactggaaaagaccacaaatgatgtca

SEQ ID NO: 21010 - DNA, 1260 bp, synthetic construct
  misc_feature 1..1260: note = source = /note="Description of Artificial Sequence: Synthetic coding sequence"
  source 1..1260: mol_type = other DNA
atgcacctgctgggatttttctccgtggcgtgttctctgcttgccgcagccttgctgcctggcccacgcgaggcgccagccgccgcggctgcattcgaatccgggctcgacttgtcggatgcagagcccgacgcaggagaagcaactgcttacgcatccaaggatctggaggagcagcttagatccgtgagctccgtcgatgagttgatgaccgtgctgtatcctgaatactggaaaatgtacaagtgtcaacttcggaaaggtggatggcagcataaccgcgagcaagcgaatctgaactcgcgcactgaagaaactataaagttcgcagcagcacattacaacaccgaaattctcaagtcaattgataacgagtggagaaaaactcagtgtatgccccgcgaagtgtgtattgatgttggcaaggaattcggcgtggcgactaataccttctttaaacccccgtgcgtgagtgtctaccggtgtggaggttgttgtaactcggaagggctgcagtgtatgaataccagcactagctacctttcaaagacgctttttgagatcactgttcccctgtcgcagggtccaaaaccagtcaccatttccttcgcaaaccacacttcctgtcgatgtatgagcaagctggacgtgtaccgccaagtccattcaatcatacggagatccctgcctgctacccttccccagtgtcaggcagctaataagacgtgtcctaccaactacatgtggaacaaccatatatgccgctgtctggctcaagaggacttcatgttttcatcggatgcaggagacgattcgactgatggatttcatgacatttgtggaccgaacaaagaacttgatgaagaaacgtgtcagtgcgtttgtcgagctggacttcggccagcgagctgcggcccacataaggaacttgatcgcaactcctgccagtgtgtgtgcaagaataagctgtttccaagccagtgtggagccaaccgcgaatttgacgagaacacctgccaatgcgtgtgtaaacgcacctgccctagaaatcaaccactgaatccgggtaagtgtgcgtgtgaatgtacggaatcgcctcaaaagtgccttctcaagggaaagaagtttcaccatcaaacttgttcatgctaccgccggccttgtactaatcgacagaaggcctgcgaacccgggttttcgtactcggaagaagtgtgcaggtgcgtccctagctactggaaacgcccgcagatgatgtcc

SEQ ID NO: 21011 - DNA, 1260 bp, synthetic construct
  misc_feature 1..1260: note = source = /note="Description of Artificial Sequence: Synthetic coding sequence"
  source 1..1260: mol_type = other DNA
atgcatttgctggggtttttcagtgtggcatgcagtctgctggctgctgccttgctaccaggcccaagggaggctcccgccgctgctgccgccttcgagtccggcctggacctctccgacgcagaaccagatgccggcgaagctaccgcctacgcaagcaaggatttagaggagcagcttagatccgtgagtagcgtggacgaactgatgacagtgttatatccagaatactggaaaatgtacaagtgccagctacggaaaggcggctggcagcacaatagagaacaggccaatctaaattcacgcacagaagagactatcaaatttgccgccgctcactacaacaccgagatattaaagagtatagataacgagtggagaaagacacaatgtatgccccgcgaagtctgcatagatgtgggtaaggagttcggtgtggcaaccaacaccttctttaaacccccttgtgttagcgtgtaccggtgcggggggtgttgcaactccgagggactgcaatgcatgaatacctctacctcttacctgagtaagacactgtttgaaataacagtgcctctgtctcaaggacccaaaccagtgacaatcagctttgccaaccatacttcttgtaggtgcatgtccaaactcgatgtttaccggcaggtgcatagtatcataagacgcagtctaccagccacactgcctcaatgtcaggccgccaacaaaacctgcccaactaactatatgtggaacaatcacatctgtcgttgtttagcccaggaggacttcatgttttcatccgacgctggggacgattccaccgatgggttccatgacatttgtggaccaaacaaggagctggacgaagaaacctgccaatgcgtttgtcgcgctgggttgcggcccgcttcttgtgggcctcacaaagagctagatagaaacagttgtcaatgtgtttgtaaaaacaagctcttccctagccaatgtggagccaaccgggaattcgacgaaaatacttgccagtgtgtgtgcaaacgtacttgcccaagaaaccagccacttaatcccggcaagtgtgcctgcgagtgtaccgagtcaccccagaagtgtctgttaaagggcaagaagttccaccatcagacatgttcctgctaccggcgcccatgcaccaatcgccagaaagcttgtgagccgggtttcagttactccgaggaagtgtgccggtgcgtgccttcttactggaagagaccccagatgatgagc

SEQ ID NO: 21012 - DNA, 1260 bp, synthetic construct
  misc_feature 1..1260: note = source = /note="Description of Artificial Sequence: Synthetic coding sequence"
  source 1..1260: mol_type = other DNA
atgcacctcctcgggttcttctctgtcgcctgtagcctcctagcggcagcattactgccaggccccagggaagcccctgctgcagctgccgcatttgagagtggcctggatctgagcgacgcagaacctgatgccggggaagcaacagcctacgcgtccaaagatttggaggaacaactccgttcagttagttccgtcgatgagctgatgactgttttgtatcccgagtattggaagatgtataagtgtcagcttagaaagggcgggtggcagcataatcgagaacaggccaatctgaatagcagaaccgaggaaacaattaagttcgctgccgcgcactataacaccgaaatacttaagtctattgacaatgagtggcgaaaaacacaatgtatgccacgagaggtgtgcatagacgtgggcaaggaatttggcgtggccactaacacattctttaaacctccttgtgtgagcgtgtatagatgtggcggttgctgcaactctgaagggctgcagtgtatgaacacgtctaccagctatttgtcaaagaccctgtttgaaatcacagtgcctctgagtcaaggtcccaaacctgtaacaatcagcttcgccaatcacacctcgtgtagatgtatgtctaaactggatgtctatagacaagtgcactctatcattcgtagatctctgcctgctacgctcccacaatgtcaggctgcgaacaagacatgcccaaccaattacatgtggaataatcacatttgcaggtgtctggcccaggaagactttatgttttctagcgacgctggtgatgactccacagacgggtttcatgacatttgcggacctaataaagaactcgacgaagagacctgccagtgcgtttgccgagcgggactccgacccgcgtcatgcggaccccataaagagctggaccgcaatagttgccaatgtgtttgtaagaacaagctgtttccctcacaatgtggtgcgaatagagagtttgacgaaaacacttgccagtgtgtttgcaagcgcacttgtcctcgaaaccagccactaaacccagggaaatgtgcctgcgagtgcaccgagtctcctcaaaaatgtctcctgaagggaaaaaagtttcatcaccagacctgtagctgctatcggcgaccgtgcaccaaccgccagaaagcatgcgaaccaggattcagctattctgaggaggtgtgccggtgcgtcccctcctactggaaaagacctcagatgatgagc

SEQ ID NO: 21013 - DNA, 1260 bp, synthetic construct
  misc_feature 1..1260: note = source = /note="Description of Artificial Sequence: Synthetic coding sequence"
  source 1..1260: mol_type = other DNA
atgcatttacttggcttcttctctgttgcatgttcactgctcgccgccgcactgctgcctgggcccagagaggccccagctgccgcagctgcatttgagagtggacttgatctgagtgacgccgaaccagacgcaggtgaagcaactgcatatgctagcaaggatttggaggagcagttacggtctgtaagttcagtggatgagttaatgactgtcttgtatcccgaatactggaagatgtacaagtgccagctacgaaagggaggttggcagcacaatcgtgaacaggcaaatctgaactcacgcacagaggaaaccattaaattcgccgccgctcactataacaccgagatcctgaagagcatcgacaacgaatggcggaagacacaatgtatgcctcgcgaggtgtgtatcgatgttggcaaagagtttggggtcgctacaaacacattctttaagcccccttgcgtgtctgtttacagatgtggtggatgctgtaactctgagggactccagtgtatgaatacatcgacgtcttacttgtccaaaacccttttcgaaattaccgtcccactgagtcaggggccgaagcccgttactatttctttcgcgaatcacacatcctgccgatgtatgagtaagctggatgtctaccgccaggtgcactccattattagaagatctctacctgccactcttccccagtgccaggcagccaacaagacatgtcccacaaactatatgtggaacaaccacatctgtcggtgcttagcacaagaagattttatgttctccagtgacgccggagacgactcaacggacggcttccacgacatctgcgggccaaataaggaactggacgaggaaacctgccagtgcgtttgtcgcgcgggcttgagacctgcaagctgcggcccccataaagaactggatcgcaattcctgccaatgtgtgtgtaagaataagctgttcccttctcagtgtggtgctaaccgcgaattcgatgaaaacacctgtcagtgtgtatgcaagaggacctgcccaaggaaccagcctctgaaccccggtaaatgcgcttgcgagtgtactgagtcaccacagaaatgccttttgaaaggaaaaaaattccatcaccagacatgttcctgttatcgaagaccatgtaccaatagacagaaggcgtgtgagcccgggttctcttattccgaggaagtgtgccgttgtgtccccagctattggaaacggcctcagatgatgagt

SEQ ID NO: 21014 - DNA, 1260 bp, synthetic construct
  misc_feature 1..1260: note = source = /note="Description of Artificial Sequence: Synthetic coding sequence"
  source 1..1260: mol_type = other DNA
atgcacctgctgggattcttttcggtggcatgttcgctgcttgcagcagcacttcttccgggtcctagagaggcccctgcggctgcggcagcgtttgaatcgggacttgatctttcagatgctgaacctgatgcaggtgaagccactgcatacgcatccaaggacctggaggaacagcttagatcagtgtcgtcagtggatgaacttatgaccgtcctctaccctgagtactggaaaatgtacaaatgtcagcttagaaagggagggtggcaacacaaccgagagcaggcgaaccttaactccaggaccgaggaaactattaagtttgccgcagcgcattacaatactgaaattctcaagtcaatcgataacgagtggagaaagacccagtgtatgccacgggaagtctgtatagacgtcggtaaagagtttggtgtggccactaacacctttttcaaaccgccttgtgtctccgtgtaccgatgcggaggatgttgtaactccgaaggactgcagtgcatgaatacctccaccagctacttgagcaagactctttttgagatcaccgtgcctctgtcgcaaggaccgaagccagtgactatttccttcgcaaaccacacctcatgcaggtgtatgtccaaattggatgtctaccgccaagtgcattcaataatcagacggtcccttccagccactctgccacaatgccaagcagcaaacaaaacgtgtcctacgaactatatgtggaacaaccacatctgccgatgtctggcacaggaggactttatgttttcgtctgatgcgggtgatgatagcaccgatggttttcatgatatctgtggtcccaacaaggagctggacgaagaaacttgccagtgcgtgtgccgcgccggacttagacctgcatcgtgcggacctcacaaggaactggaccgcaattcatgtcagtgcgtgtgtaagaacaagctgtttccttcccagtgcggtgcaaacagagaattcgacgagaacacgtgccagtgtgtgtgtaagaggacgtgccctcgaaatcaaccgctcaatcctggaaaatgcgcatgtgaatgcacggaaagccctcaaaagtgtctccttaagggaaaaaagttccatcatcaaacctgcagctgctaccgccggccctgcactaacagacagaaggcatgtgaacctgggttcagctactccgaagaggtctgcagatgcgtcccatcttactggaaacgcccccaaatgatgtcg

SEQ ID NO: 21015 - DNA, 1260 bp, synthetic construct
  misc_feature 1..1260: note = source = /note="Description of Artificial Sequence: Synthetic coding sequence"
  source 1..1260: mol_type = other DNA
atgcacctgcttggtttcttttcggtcgcatgcagcctgctggcagcggcactcctgcccggcccacgggaagcaccagcagctgccgccgcattcgaatcgggactcgatctctccgacgccgaaccggacgcgggagaagccactgcatatgcctcaaaggacttggaagagcaactccgcagcgtgtcctccgtggacgaacttatgactgtgctctacccagaatactggaagatgtacaaatgtcaattgcgcaaggggggatggcaacataatcgcgaacaagcgaatctgaactcaagaaccgaagagactatcaaatttgccgcggctcactacaacaccgagatcttgaagtccattgacaacgaatggagaaagactcagtgcatgccgcgcgaagtgtgtatcgatgtgggaaaagagttcggagtggcgaccaacacttttttcaagcccccatgcgtcagcgtttaccggtgcggaggatgctgcaactcagaggggctgcaatgcatgaacacctcgacttcctaccttagcaagacgctgttcgaaatcacggtgccgctctctcagggcccgaagcccgtgaccatctcgttcgccaaccatacttcttgtagatgcatgagcaaactggatgtgtacaggcaggtccactcgattatcagaagatccctccctgccaccctcccacagtgccaggctgccaataagacgtgccctactaactatatgtggaataatcacatttgcagatgcctggctcaagaggactttatgttctcctcagatgcgggagacgactctactgatggctttcatgacatctgcgggcctaataaggagctcgatgaagaaacctgccagtgcgtgtgtcgcgcgggcctcaggcccgcgtcatgcggaccgcacaaggaattggaccgcaattcgtgccagtgcgtatgcaagaataagctcttcccatcacagtgcggagccaaccgcgaattcgatgagaacacctgccaatgcgtctgcaagaggacctgcccccggaaccagcctctgaacccaggaaagtgcgcctgcgagtgtactgagtcgccccagaagtgcctgctcaagggcaagaaattccaccatcagacgtgcagctgttaccgccggccgtgtactaatagacagaaggcctgtgaaccaggtttctcgtactcggaagaagtgtgccggtgtgtgccgagctactggaaaagacctcagatgatgtcg

SEQ ID NO: 21016 - DNA, 1260 bp, synthetic construct
  misc_feature 1..1260: note = source = /note="Description of Artificial Sequence: Synthetic coding sequence"
  source 1..1260: mol_type = other DNA
atgcacctactgggcttcttttctgttgcttgctcccttctagcggccgcattgctccccggccccagagaggccccagcagccgccgccgcgtttgagtcggggttggacctgagcgacgcagagccagacgcgggagaggcgacagcatacgcatctaaggacctggaagagcagctcaggtctgtaagctccgttgatgaactgatgactgtattgtatcctgagtattggaagatgtacaaatgccagctccggaaagggggttggcagcataatcgcgaacaggccaatctcaacagtagaactgaagaaactattaaatttgccgccgcacactataacaccgaaattttgaaatccatcgacaacgaatggagaaagacacagtgtatgccgagagaggtatgcatcgacgtgggcaaagagttcggggtcgccaccaacacctttttcaagcctccttgtgttagtgtgtaccggtgtggcggatgttgcaactcggagggcctgcagtgtatgaacactagcacctcttacctgtccaaaaccctgttcgagatcactgttccactgtcccaaggtcccaagccggtgacaatttcattcgccaaccacacttcatgcaggtgtatgagtaagctggatgtttatcgccaggtgcatagtattatacgcagatcattaccggcaaccctgccacagtgtcaggcagcaaataaaacatgccctacaaactatatgtggaacaatcacatttgccggtgcttggctcaggaggactttatgttcagcagtgacgcgggtgatgattctactgatggttttcacgatatttgcggccctaataaagaactggacgaggagacctgccagtgcgtgtgtagggctggactgaggcccgcatcttgcggcccccacaaagagttggacaggaatagctgtcaatgtgtgtgcaaaaataaactattcccctcccagtgcggtgcaaatcgtgagttcgacgagaatacatgtcagtgcgtttgtaagaggacgtgcccaagaaaccaaccactgaaccccggcaaatgtgcatgcgaatgtactgaaagcccccaaaagtgtctgctgaaagggaaaaaattccatcaccagacttgctcatgttatcgacggccttgcaccaatagacagaaggcttgcgagcccggcttctcctactccgaggaggtgtgccgctgcgtgccaagttattggaaacgccctcagatgatgtca

SEQ ID NO: 21017 - DNA, 1260 bp, synthetic construct
  misc_feature 1..1260: note = source = /note="Description of Artificial Sequence: Synthetic coding sequence"
  source 1..1260: mol_type = other DNA
atgcaccttttagggtttttctccgtagcctgttctctgctggctgccgccctccttcccgggcccagagaagcacccgccgccgccgccgcgttcgagtccgggctggatctgtctgatgctgaacccgacgccggggaggcaacagcctatgcatctaaagatcttgaagagcaactgagatctgtgtcctccgtggatgaactgatgacagtgttatatcccgaatactggaaaatgtataaatgtcagctgcgaaaaggagggtggcagcacaatcgggaacaggctaatttgaattccagaacagaagaaacaattaaatttgccgctgcccattacaatacagaaattctgaaatctatagacaacgaatggcggaaaacacagtgtatgccacgggaagtgtgcatcgacgtagggaaggaattcggagtagcaacaaatacattcttcaaacccccctgtgttagtgtttacaggtgtggagggtgctgtaactctgaagggttacagtgtatgaatactagtacatcctatctctccaaaactctttttgaaataacagtacccctctcccaggggcctaaaccagtgacaatatccttcgccaaccatacttcatgcagatgcatgtcaaaattagacgtttaccggcaggttcattccataatcagacggagtctccctgccacgctgccacagtgtcaggcagccaacaaaacatgccccactaattacatgtggaacaaccacatatgccggtgtctagcacaggaagatttcatgttttcctctgatgctggggatgattccactgatgggttccatgacatttgtggaccaaataaagaactggatgaagaaacttgtcagtgtgtatgccgcgcaggactcagacctgcatcatgtgggccacacaaagagctcgataggaattcttgtcagtgtgtgtgcaaaaacaaactttttccttcccagtgcggagctaatcgagaattcgacgagaacacatgccagtgcgtgtgtaaaagaacatgcccccggaaccagcctctaaatccagggaagtgtgcctgtgagtgcactgaatcaccccagaaatgcctactaaaagggaaaaaattccaccaccagacatgttcttgttataggaggccctgcactaatagacagaaggcctgcgaacctggattctcatatagtgaagaagtatgccggtgtgtgccatcgtattggaaaaggccacagatgatgtca

SEQ ID NO: 21018 - DNA, 1260 bp, synthetic construct
  misc_feature 1..1260: note = source = /note="Description of Artificial Sequence: Synthetic coding sequence"
  source 1..1260: mol_type = other DNA
atgcatctcctcggattcttctccgtggcctgctcgcttctggccgcggcccttcttcccgggccgcgggaagcaccggccgcggcggccgcatttgaaagcggtttggatttgtcggacgcggaaccagatgcgggtgaagccaccgcctacgcgagcaaggatctggaagaacagttgagatcagtgtcatccgttgacgagctgatgactgtgctgtaccccgagtactggaagatgtataagtgccagcttcggaagggaggatggcaacacaaccgggaacaagcaaatctgaattctcgcaccgaagaaaccattaagttcgcagccgcccattacaataccgaaatcctcaagtcgatcgacaacgagtggcggaaaactcaatgtatgccaagggaagtgtgcatcgatgtgggtaaggagttcggagtggcgactaacacctttttcaagccgccatgtgtgtcagtctacagatgtggaggatgctgcaactccgaaggattgcagtgcatgaacacgtccacttcatacctgtccaagacgctgttcgagatcaccgtgccgctgagccaaggtccaaagcccgttaccatctccttcgcgaatcacacctcctgcagatgcatgtcgaagctggacgtctaccgtcaggtgcactcaatcatcaggagatcgctgcctgccactctcccgcagtgccaagccgctaacaagacttgtccgactaattacatgtggaacaatcatatctgtagatgcctggcgcaagaggatttcatgttctcatccgacgccggagacgattccacggatggtttccacgacatctgcggcccgaacaaagaactcgacgaagagacttgccagtgcgtctgccgcgccggcctgcgcccggcttcctgcggaccgcacaaggagctggaccgtaactcctgtcagtgcgtgtgcaagaacaagctgttcccatcgcagtgcggggctaaccgggaattcgacgaaaacacctgccagtgtgtgtgcaagagaacctgccctagaaaccagcctctgaacccagggaagtgcgcttgcgagtgcaccgaatcgccgcagaagtgccttctgaaaggtaagaagttccaccaccagacctgctcctgctaccggcgcccgtgcactaaccgacagaaggcttgtgaaccaggtttttcgtactcggaggaggtgtgccggtgtgtcccatcctattggaagcgcccgcagatgatgtct

SEQ ID NO: 21019 - DNA, 1260 bp, synthetic construct
  misc_feature 1..1260: note = source = /note="Description of Artificial Sequence: Synthetic coding sequence"
  source 1..1260: mol_type = other DNA
atgcacttattgggttttttttcagttgcgtgctctcttctggcggctgcactacttcctggacctcgagaagctccggctgctgcagcagcattcgagtcgggtcttgacctgagcgacgctgaacctgacgcaggggaagctacagcgtacgcctctaaagacctggaagaacagcttcgatctgtttcaagcgttgatgaactgatgactgtcctgtatccggagtactggaaaatgtacaagtgccagctgcgcaaagggggatggcaacacaaccgagaacaggctaatctgaattcgcgcacggaagagacaattaaatttgccgcagctcactacaacacggagattttgaaaagcatcgataatgaatggcggaaaacacaatgtatgcctcgggaggtctgtattgatgtcggcaaggagtttggagtcgcgactaacacattcttcaaacctccttgtgtctctgtttatagatgcggtggatgctgtaactctgaaggattgcaatgcatgaatacttccacatcatacttatcaaaaacactctttgaaatcactgtaccgttatcccagggccctaaaccagttacgatttcatttgctaaccatacaagctgccggtgtatgtctaaattggatgtatatagacaagtgcacagcattattcggcgctcactgccggctacccttccacagtgtcaggcggcgaacaagacttgcccaacaaactacatgtggaataatcacatatgccggtgcctggcacaggaggactttatgttctcctctgatgcgggggatgattccaccgacgggttccatgatatttgcggtcccaacaaagaacttgatgaggaaacttgtcaatgtgtctgtcgtgccggcttgagaccagcgtcatgtggacctcataaagagcttgatcgtaacagttgtcaatgtgtttgcaagaataaattgtttccgtctcagtgcggcgcaaatcgtgaattcgacgaaaatacatgtcaatgtgtttgcaagcgaacatgcccgcgtaatcagccgcttaatccgggcaagtgtgcctgtgagtgtacagaatcacctcaaaagtgtcttctaaaaggcaaaaaatttcatcatcaaacgtgtagttgttacagaaggccgtgtacaaatagacagaaagcttgtgaaccaggcttttcttatagcgaggaagtttgccgttgcgtcccatcatattggaaacgtccgcaaatgatgtca

SEQ ID NO: 21020 - DNA, 510 bp, synthetic construct
  misc_feature 1..510: note = source = /note="Description of Artificial Sequence: Synthetic coding sequence"
  source 1..510: mol_type = other DNA
atggatactcgaaataaggcgcaactacttgtgctcctgactctcctgtcagtgctgttttcccagacctcagcatggcccctgtacagggcgcctagcgcacttcgcttgggcgacaggatcccatttgaaggtgctaatgagccagaccaggtctcactgaaggaagatatcgacatgctgcagaatgcccttgctgagaatgacactccttattacgatgtctcaaggaacgccaggcacgctgacggcgtctttacatcagacttttcaaagctactcggccagttatccgcgaaaaaatacctggagagcctgatgggaaagagggtaagtagcaacattagcgaggatccggttcccgtaaaaaggcacagtgatgctgtttttaccgacaactatactcgcctgcggaagcagatggcggtgaaaaagtatctgaactcaatcctaaatggtaagaggagttcagaaggtgaaagccctgattttcctgaagagctggagaag

SEQ ID NO: 21021 - DNA, 510 bp, synthetic construct
  misc_feature 1..510: note = source = /note="Description of Artificial Sequence: Synthetic coding sequence"
  source 1..510: mol_type = other DNA
atggacactagaaataaggcccaactgctggtactactcaccttacttagcgtgttattctcacagaccagtgcatggcccctgtatagagccccatcggccctgcgcctcggcgaccgaattccgttcgagggagccaatgagcccgatcaggtgagccttaaagaggatattgatatgctccaaaacgccctggcggagaacgacacaccatattatgacgtttctcgcaacgcccgccatgcggatggcgtatttacctctgattttagcaaattgctgggtcagttgtccgccaagaaatatctggagagtcttatggggaagcgggtgtcttcaaacatcagcgaagatccagtgcctgtaaaacggcatagcgatgccgtgttcaccgacaactatacccggcttcgtaaacagatggcagtgaagaaatatctgaacagcatcctgaacggtaagcgcagtagcgagggtgagtctccggattttcccgaagagctggagaag

SEQ ID NO: 21022 - DNA, 510 bp, synthetic construct
  misc_feature 1..510: note = source = /note="Description of Artificial Sequence: Synthetic coding sequence"
  source 1..510: mol_type = other DNA
atggacacgcgcaataaggcccaacttctggtactgttgacattgttgtcggtgttgttctcccaaacgagcgcctggcccttgtacagagcgccgtcggcccttagactcggagatcgaattccgttcgaaggagccaatgaaccagaccaggtctccttgaaggaagacattgacatgctgcaaaatgctctggcggagaatgatacgccgtattatgatgttagtcgcaacgctcgccacgccgacggagtattcacatccgatttttctaagctcctggggcagttgagcgccaagaaatatttggaaagcttgatgggcaagcgcgtgagttcaaacataagcgaggacccggtgcctgtgaagcgtcattcggatgccgtgttcacagataactacacacgacttcgtaagcaaatggcagtaaagaagtacctgaatagtatactgaacgggaagcggtcgtcggagggcgagtcaccagatttccccgaagagctggaaaag

SEQ ID NO: 21023 - DNA, 510 bp, synthetic construct
  misc_feature 1..510: note = source = /note="Description of Artificial Sequence: Synthetic coding sequence"
  source 1..510: mol_type = other DNA
atggatactcggaacaaggcccagctccttgtgctcctgactctcctgtcggtgctgttctcccaaacctcagcctggccgctgtaccgcgcacccagtgctctgcgcttgggggaccgcatcccgttcgagggagctaacgagccggatcaagtcagtctcaaggaagatatcgatatgcttcagaacgccctggccgaaaatgacactccttactatgacgtttcgaggaacgcgaggcacgccgatggtgtctttacgtcagatttcagcaaattgctgggtcagctctccgcaaagaaataccttgaatcgctgatgggaaagcgcgtctcttcgaatatctccgaggaccccgtgccggtcaagagacattcagacgctgtgtttaccgacaattacacccggcttcgcaagcagatggcagtgaaaaagtacctcaatagcattctgaacggaaaaagaagttccgaaggcgagtcacctgatttcccggaagagcttgaaaag

SEQ ID NO: 21024 - DNA, 510 bp, synthetic construct
  misc_feature 1..510: note = source = /note="Description of Artificial Sequence: Synthetic coding sequence"
  source 1..510: mol_type = other DNA
atggataccaggaataaggctcagcttctggtccttctgaccttgctgtcggtccttttttcacaaaccagcgcatggccgctgtacagggcacctagcgcactgcggctgggtgaccggatccctttcgaaggtgccaacgagccagatcaagtgtcacttaaagaagatattgacatgctgcaaaacgcgcttgccgagaacgacactccatactacgatgtctcgagaaacgcaaggcacgcggacggcgtgtttacctcagatttcagtaaacttctgggacaactgtcggcaaaaaagtaccttgaatcccttatggggaagagagtctcgtccaacatatccgaagatcctgttccagtgaagcggcatagcgatgctgtgttcactgataactacactcggctgaggaagcaaatggcagtgaagaagtaccttaactcgatcctcaacgggaagcgaagctccgaaggcgagtccccagactttccagaagaacttgagaag

SEQ ID NO: 21025 - DNA, 510 bp, synthetic construct
  misc_feature 1..510: note = source = /note="Description of Artificial Sequence: Synthetic coding sequence"
  source 1..510: mol_type = other DNA
atggatacccggaacaaagcccagttgctcgtgctgctcactctcctgagcgtcttgttctcccaaacgtccgcatggccactgtaccgagcgccgtccgcccttaggctgggagacagaatcccgtttgaaggtgcgaacgaacccgatcaggtcagcctgaaagaggacatcgacatgctgcagaacgctttggcagaaaatgacaccccgtattacgacgtgagcagaaatgcacggcacgccgatggcgtgttcacttccgatttttcgaaactcctcgggcagctgtccgcgaagaagtacctggagtcgcttatgggaaagcgcgtcagcagtaatatctcagaggacccagtgcctgttaagcgccattcggacgccgtgttcaccgacaactacactcgcctgcgcaagcaaatggctgtgaaaaagtaccttaactcaattctgaacggaaagcggtcatcggagggcgaatctcctgatttcccggaagagctggaaaag

SEQ ID NO: 21026 - DNA, 510 bp, synthetic construct
  misc_feature 1..510: note = source = /note="Description of Artificial Sequence: Synthetic coding sequence"
  source 1..510: mol_type = other DNA
atggatactagaaacaaggcacaacttctggtgttgcttacccttctttcggtgcttttctcacaaacttcagcgtggcctctgtacagggccccatcagctctccggcttggagacagaattccatttgaaggtgccaatgaacccgatcaagtcagtctcaaagaggatattgatatgcttcagaacgcactcgcagaaaacgatactccatactacgatgtgtcgaggaacgcaagacacgccgatggagtctttacttccgacttctccaaactgcttggacagctttcagccaagaaataccttgagagccttatgggcaagcgtgtctcaagcaacatatccgaagatccggtccctgtgaaacgacatagcgatgcagtgtttaccgacaactacacccgactgagaaagcaaatggcagttaagaagtatctgaactcaattctcaatggtaaacgctcgtccgaaggagaatcccccgattttccagaggaactggaaaag

SEQ ID NO: 21027 - DNA, 510 bp, synthetic construct
  misc_feature 1..510: note = source = /note="Description of Artificial Sequence: Synthetic coding sequence"
  source 1..510: mol_type = other DNA
atggacacccggaacaaggcccaactgctggtcctccttactctcttgtcagtgcttttcagccagacttcagcgtggccgctctaccgggcaccaagtgcactgagactgggcgatcgtatcccattcgaaggagccaacgagccggaccaagtatccctcaaggaagatatcgatatgctccagaatgccctcgctgaaaatgataccccttattacgatgtttcgcgcaatgctcggcatgcggacggagtctttacctccgatttctcaaaacttctggggcagctgtcagctaagaagtacctggaatccctgatgggtaagcgggtgagctccaacattagcgaggacccggtgcctgtgaagcgccactcggacgccgtgtttactgacaattacactcgactgcgcaaacagatggcagtgaagaagtacttgaacagcatactcaacggcaaaaggtcgtcggaaggagagagcccggactttcccgaggagttggagaag

SEQ ID NO: 21028 - DNA, 510 bp, synthetic construct
  misc_feature 1..510: note = source = /note="Description of Artificial Sequence: Synthetic coding sequence"
  source 1..510: mol_type = other DNA
atggatacaagaaataaagctcagttacttgttcttttaacattattatctgttctattctcccaaactagtgcatggccattgtatagagcaccatcagcattaagattaggtgacagaattccatttgaaggagcaaatgaaccagaccaagtttcacttaaagaagatattgatatgttacaaaatgcattggcagaaaatgacacaccatactatgatgttagtagaaatgctagacatgcagatggggtttttacatctgatttttcaaaattattaggacaacttagtgcaaaaaaatatttagaatctcttatggggaaacgagtatctagtaatatatctgaagatccagtaccagtaaaaagacattctgacgctgtattcacagataattatactcgtttaagaaagcaaatggctgttaaaaaatatcttaattcaattttaaatggaaagagatcctcagaaggagaatcaccagacttccctgaagaattggaaaaa

SEQ ID NO: 21029 - DNA, 510 bp, synthetic construct
  misc_feature 1..510: note = source = /note="Description of Artificial Sequence: Synthetic coding sequence"
  source 1..510: mol_type = other DNA
atggatacgcggaacaaggcgcagttattggttttgctcacattactttcggtcttgttttcacagacttctgcgtggcctctgtatcgggccccttccgcactgcgccttggagaccgcattccgtttgagggcgctaacgaacctgatcaggtaagccttaaagaggacattgatatgttacagaatgctctcgctgagaatgatacaccgtattacgacgtatctcgtaatgctagacatgctgatggtgttttcacgtctgacttttctaagttgcttggacaactgtcagctaagaaatatcttgaatctttaatgggaaagcgggtttcttctaatatttcagaggatccggtcccggtgaaaagacactccgatgcggtctttactgataactatacacgattgagaaaacaaatggcggttaagaaatacctcaattctatcctcaatgggaagagaagcagcgaaggagagagcccggacttcccggaagaacttgaaaaa

SEQ ID NO: 21030 - DNA, 510 bp, synthetic construct
  misc_feature 1..510: note = source = /note="Description of Artificial Sequence: Synthetic coding sequence"
  source 1..510: mol_type = other DNA
atggacacacgaaacaaggcacagctattggtccttctcacacttctgtctgttttattttctcagacgagcgcctggccactatatagggctccctccgccttgcggctcggagatagaatcccttttgaaggcgcaaacgaacctgatcaagttagtttaaaagaggatattgacatgctccagaacgccctcgctgagaacgacaccccatactatgacgtgtcgcgaaacgctcgccacgctgacggggtgtttacaagcgatttttccaaactgctgggtcaactctcagctaagaagtatcttgagtccctgatgggcaaaagggtttccagcaacatttccgaagatcctgtgccagttaagaggcacagcgatgctgtttttactgacaattatacacgcctgcggaaacagatggctgtgaaaaagtacctgaactccatcctgaacgggaaaaggtctagtgagggtgagagtcctgatttcccagaagagttagagaaa

SEQ ID NO: 21031 - DNA, 510 bp, synthetic construct
  misc_feature 1..510: note = source = /note="Description of Artificial Sequence: Synthetic coding sequence"
  source 1..510: mol_type = other DNA
atggacacgcgcaataaggcgcagctcttggtgcttctcactctcctctcggtgcttttttcacaaacctcggcatggcctctgtatcgagccccaagcgcattgaggctgggagatagaatcccgttcgagggcgcaaacgagcccgaccaggtgtcgttgaaggaggatatcgacatgcttcaaaacgcgctggccgaaaatgataccccatactacgacgtgagccggaacgctagacacgcggatggagttttcacttccgatttctctaaactgctgggccagctctccgccaagaaatacctcgagtccctgatgggtaagagagtcagctctaacatctcggaggacccggtcccggtgaagcggcattccgacgccgtttttactgacaattacaccagactgcggaagcagatggcggtgaaaaagtacctgaactccattctcaacgggaaaaggtcgtcggaaggagagtctccggatttcccagaagaattggaaaag

SEQ ID NO: 21032 - DNA, 510 bp, synthetic construct
  misc_feature 1..510: note = source = /note="Description of Artificial Sequence: Synthetic coding sequence"
  source 1..510: mol_type = other DNA
atggatactcgcaataaagcccagctgctggttctgctgacgctactgtccgtcctgttttcacagacctctgcttggcccctctacagagccccctcagccctgcggttgggggataggatacctttcgagggtgccaatgagcctgaccaagtttctcttaaagaggacatcgatatgctgcagaatgcattagccgagaacgatactccctattatgacgtgtcaaggaatgccagacatgcagatggagtcttcacctccgatttctcgaagctcctcgggcagttgtctgccaagaaatacttggaaagccttatgggtaaaagggtgtcctccaatatctccgaagaccctgtgccagtgaaacgccatagcgacgccgtgtttacggacaactatacccgcctccgcaaacagatggccgtgaaaaagtatcttaacagcattctcaacgggaagcgctcttcagagggggaatctcccgattttcccgaagaactggaaaag

SEQ ID NO: 21033 - DNA, 510 bp, synthetic construct
  misc_feature 1..510: note = source = /note="Description of Artificial Sequence: Synthetic coding sequence"
  source 1..510: mol_type = other DNA
atggataccaggaacaaggcccaactcttggtgttgctgacccttctatcggtcctgtttagccagacatccgcttggcccttgtacagggctccctctgcattaaggctgggagataggatccctttcgaaggcgctaacgaaccagaccaggtatccttgaaagaggatattgacatgctacagaacgcccttgccgagaacgataccccttactatgacgtgtcccggaatgcacgccacgctgacggcgtttttactagtgacttttctaaactattaggacagctgagcgccaaaaagtatttggagagccttatggggaagcgagttagctcaaatatttctgaagatcctgtaccagtgaagagacattccgacgctgtgtttaccgataactatacaaggctgaggaaacagatggctgttaagaaatatcttaacagtatcctgaatgggaagagatcgtcggaaggtgaaagccccgattttccagaggaactcgaaaag

SEQ ID NO: 21034 - DNA, 510 bp, synthetic construct
  misc_feature 1..510: note = source = /note="Description of Artificial Sequence: Synthetic coding sequence"
  source 1..510: mol_type = other DNA
atggatacaagaaataaagcgcaattactggtcctgctgactttgttgagcgtgctgttttctcagactagcgcttggcccctttatcgggcaccatcggcgctccggctaggcgatagaatacccttcgaaggagccaatgaaccagatcaggtttctctcaaggaagatatcgatatgctgcagaacgccctggcagaaaacgacacaccatactatgatgtctctcgcaacgcgcggcatgctgatggcgtgtttacttctgattttagcaagcttctggggcaactaagtgccaagaagtacctagagagtctgatgggaaagcgggtgagttccaatatatctgaggaccccgtgccggtcaagaggcattccgatgctgtcttcacagacaattatactcggctgcggaaacagatggcagttaagaagtatttaaacagcatcctgaatggaaagcgaagctctgaaggagagagccccgactttccagaggagttggaaaaa

SEQ ID NO: 21035 - DNA, 510 bp, synthetic construct
  misc_feature 1..510: note = source = /note="Description of Artificial Sequence: Synthetic coding sequence"
  source 1..510: mol_type = other DNA
atggacacccggaataaggcccaacttctcgtgttgctaacactgcttagcgttttgttttcccagacttccgcctggcctctttaccgcgctccgagcgccctgcgtttgggcgataggataccatttgagggcgcgaacgaaccggatcaagtatccttgaaggaagacattgatatgcttcaaaacgccttggctgagaacgataccccatactacgacgtatctcggaatgcaaggcatgcagacggggtgttcacatcagatttttcaaagctgctgggccaactgagcgcgaagaagtaccttgagtctttaatgggaaagcgcgtttctagcaatatctccgaggacccagttccggtaaaacgccactctgacgctgtgttcacagataactacacgcggttgaggaagcagatggcagtaaaaaagtatttaaattctatcttgaacggtaagaggtcaagtgagggtgaatcaccggatttcccagaggagcttgagaag

SEQ ID NO: 21036 - DNA, 510 bp, synthetic construct
  misc_feature 1..510: note = source = /note="Description of Artificial Sequence: Synthetic coding sequence"
  source 1..510: mol_type = other DNA
atggatacgcggaacaaggcacaactgctcgtgctgttgactcttctgagcgtccttttttcgcaaacctcggcctggcccctttaccgagcaccctccgcacttcggcttggcgatagaattccttttgaaggcgctaacgaacccgaccaagtttcactcaaggaggacattgatatgctgcagaacgcgctcgcggagaatgatactccttactatgatgtgtccagaaatgctagacacgccgatggagtgttcacctcagacttctccaagctgcttggacaactctcggcaaagaaataccttgaatcgctcatgggtaagcgggtgtcatccaacattagcgaagatcctgtgcctgttaagcgccacagcgacgcagtgtttaccgacaattacacccgtctgcgcaagcaaatggcagtgaaaaagtaccttaattccatcttgaacggtaaaagatcctctgagggtgaatcacctgacttcccagaagaactcgaaaaa

SEQ ID NO: 21037 - DNA, 510 bp, synthetic construct
  misc_feature 1..510: note = source = /note="Description of Artificial Sequence: Synthetic coding sequence"
  source 1..510: mol_type = other DNA
atggatactcgaaacaaagctcagctgctggtgctgctgactttgctctcagtgcttttctcccagacctcggcatggcccctttatagggcaccctcagcgcttcggcttggcgatcggatcccatttgagggagccaacgagcctgatcaagtgtccctcaaagaagatatcgacatgcttcagaacgcgctggcagagaacgataccccatactacgacgtcagccgcaatgctcgtcacgcagatggagtgttcaccagcgatttttccaaacttctcggtcaactgtcagcgaagaagtacttggaatcacttatgggcaagcgcgtctctagcaacattagcgaagatccggtgcctgttaagcggcattcggacgcagtatttacggataactacacccggcttcggaagcaaatggcggtgaaaaagtatctgaactccatactcaacgggaagcgttcgagcgaaggagaatcacctgattttcccgaagagctggagaag

SEQ ID NO: 21038 - DNA, 510 bp, synthetic construct
  misc_feature 1..510: note = source = /note="Description of Artificial Sequence: Synthetic coding sequence"
  source 1..510: mol_type = other DNA
atggacacccggaataaagcacagctgcttgtgctgctgaccctgctcagcgtgctcttctcccagactagcgcctggccgctgtaccgggctccgtcggccctgcggctgggggaccggattccattcgagggcgccaatgaaccggatcaagtgagcctcaaggaagatatcgatatgctgcagaacgctctcgctgaaaatgacaccccatactacgacgtgagcagaaatgccagacatgccgatggagtgttcacctcggacttcagcaagctgcttggccaactgtcggcaaaaaagtacctggagtccctcatgggcaagcgcgtctcctctaatatctcggaagatccagtgcccgtgaagcgccattccgacgcggtgtttactgacaattacaccagattgcgcaaacagatggccgttaagaagtatctgaattccatcctcaacggaaagcgctccagcgagggagaatcgcccgatttcccggaggagctcgaaaag

SEQ ID NO: 21039 - DNA, 510 bp, synthetic construct
  misc_feature 1..510: note = source = /note="Description of Artificial Sequence: Synthetic coding sequence"
  source 1..510: mol_type = other DNA
atggatactagaaacaaggcccagctgctcgtcctcctgactttgctctcggtgctgttctcgcaaacctctgcctggcccctctacagagcaccttcggcactgaggctcggtgatcggattccatttgagggcgccaacgaacccgaccaagtgagcctgaaagaagatattgacatgctccagaacgcacttgcagagaacgataccccatactacgacgtctcgcggaacgcccgccatgcagatggagtgtttacttctgatttttcgaagttgcttgggcaactgagcgccaaaaagtaccttgaatcccttatggggaagcgcgtttcgtcgaatatctccgaagatcctgtgcctgtcaagagacactcggacgcagtgtttaccgacaattacactagattgcgcaagcagatggcggtcaagaaatacctgaactctatcctgaacggtaagagatcaagcgagggagaatcgcctgactttccggaagaacttgaaaag

SEQ ID NO: 21040 - DNA, 510 bp, synthetic construct
  misc_feature 1..510: note = source = /note="Description of Artificial Sequence: Synthetic coding sequence"
  source 1..510: mol_type = other DNA
atggataccagaaacaaggctcaactgctcgtcctcctaactctgctcagcgtcttgttctcgcagacctccgcctggcccttgtaccgggcccctagcgctttgcgcttgggggaccgcattccatttgagggtgctaacgagcccgaccaggtttcgctgaaagaggacatagacatgctccaaaacgcgctggcggagaatgatacgccctactatgacgtcagtcggaacgctcgccacgctgacggtgtcttcacgagcgacttctccaagctcttgggccaactgtctgccaagaagtacctagaatccctcatgggtaaacgcgtctcctcgaacatctcggaggatcctgtgccggttaagcgccacagcgacgcagtcttcaccgataactacacacggctgcgaaagcagatggccgtcaagaagtacttgaattccatactcaacggaaaacgtagttctgagggtgaatccccagactttcctgaggaacttgagaaa

SEQ ID NO: 21041 - DNA, 510 bp, synthetic construct
  misc_feature 1..510: note = source = /note="Description of Artificial Sequence: Synthetic coding sequence"
  source 1..510: mol_type = other DNA
atggatacaagaaataaagcgcagcttctggtgttgcttaccttgttgtcggttcttttttcgcaaacttctgcttggccactttatagagctccttcggctcttagacttggagatagaattcctttcgaaggagcaaatgagccagatcaagtctccttaaaagaagacatcgatatgctccagaatgctcttgcggagaatgacacaccgtattacgatgtgagtagaaatgctcgacatgctgatggagtatttacatcagattttagtaagctgcttggacaacttagtgcgaaaaaatatctggaatctttgatgggtaagcgtgtctcttctaacatctcagaggatcctgtcccggtgaagagacattctgacgcagtattcacagataattatacaagattacggaaacagatggcagttaagaaatatttgaatagtattcttaatggtaaaagatcatcggagggggaaagtccggactttccagaggagcttgagaaa

SEQ ID NO: 21042 - DNA, 510 bp, synthetic construct
  misc_feature 1..510: note = source = /note="Description of Artificial Sequence: Synthetic coding sequence"
  source 1..510: mol_type = other DNA
atggatacgcggaacaaggcacagctcctggtgctgctaactctgctctcagtcttgttctctcaaacctccgcctggcctctgtatagagcaccatcggcgttgcgcttgggagatcgtatcccgtttgaaggtgccaatgagcctgaccaggtctcactgaaagaagatatcgatatgttgcaaaatgctttagccgaaaacgataccccgtactacgacgttagccgaaatgccaggcacgctgacggggtcttcaccagtgacttctccaaattactgggccagctgagcgcaaaaaagtacctcgaatccctaatgggaaagcgcgttagttcgaacatttccgaggatcctgttcccgtcaagcgtcacagcgatgctgtgttcactgataactacacgaggctgcgaaaacaaatggccgtgaaaaaatatttgaatagcatcctgaatgggaaaaggtctagtgaaggtgagtctccggactttcccgaagaacttgaaaaa

SEQ ID NO: 21043 - DNA, 510 bp, synthetic construct
  misc_feature 1..510: note = source = /note="Description of Artificial Sequence: Synthetic coding sequence"
  source 1..510: mol_type = other DNA
atggacaccaggaacaaagcacagctgttggtcctcctgaccctgctcagcgtgttgttcagccaaacttccgcatggcctctgtacagggcaccttcagcccttcggcttggtgatcgaattccatttgaaggagccaacgaacccgaccaggtgtcgctgaaggaggacattgatatgctccagaacgcgctggcggagaatgacacgccttattacgatgtcagccgcaacgcccggcacgccgatggggtttttactagcgattttagcaaactccttgggcaactcagtgcaaagaagtaccttgaatcccttatggggaaacgcgtgtcgtctaatatctccgaagatccagtgcctgtgaagcgtcattccgatgcggtattcactgataactacacccgactcagaaagcaaatggcagtgaagaagtacctgaactccatactgaacggtaagaggagctccgagggagaatcgcccgattttcctgaagagttggagaag

SEQ ID NO: 21044 - DNA, 510 bp, synthetic construct
  misc_feature 1..510: note = source = /note="Description of Artificial Sequence: Synthetic coding sequence"
  source 1..510: mol_type = other DNA
atggacacccgaaacaaggcgcaactgctggtcttgttgactctgctctcggtgctgttctcccagacctcggcatggcctctgtaccgcgcccccagtgcattgagactcggagatcgcattccgtttgagggagcaaacgaacccgatcaagtatcgctgaaagaagatattgatatgctgcaaaacgctctggccgaaaacgatactccgtactacgatgtgagccgcaatgccagacatgctgacggtgtgtttacttccgatttctccaagctgctcggtcaacttagcgcaaagaagtaccttgaatcgctgatgggaaagcgcgtgtcgagcaatatctccgaggacccagtgcctgtgaagagacattctgacgccgtctttaccgataactacactagacttaggaagcagatggccgtgaaaaagtacctgaattcgattcttaacggcaaaaggtcaagcgagggagaatcaccagacttcccagaagagctggaaaaa

SEQ ID NO: 21045 - DNA, 510 bp, synthetic construct
  misc_feature 1..510: note = source = /note="Description of Artificial Sequence: Synthetic coding sequence"
  source 1..510: mol_type = other DNA
atggacacaaggaataaggctcagctcctggtgttgctcactctactttccgttttattttctcaaacaagcgcctggcctttgtatcgggctccaagcgcgctccggctcggggatagaataccttttgagggggccaatgaaccagaccaggtgtccctgaaggaggatatcgacatgctgcagaatgctctggctgagaacgatacaccttattatgacgtgtcccggaatgcacgacatgctgatggcgtattcacctcggactttagtaagctgctgggccagttgagcgccaagaaatacctcgaatcattaatgggtaagcgggtcagttcaaacattagcgaagatcctgtaccagtgaagagacactctgacgctgtgttcactgacaattatacacgcctgcgaaagcagatggccgtgaaaaagtatttaaattccatcctaaacggaaagcgatcaagtgagggcgaatctcctgattttccagaggagctcgagaag

SEQ ID NO: 21046 - DNA, 510 bp, synthetic construct
  misc_feature 1..510: note = source = /note="Description of Artificial Sequence: Synthetic coding sequence"
  source 1..510: mol_type = other DNA
atggacacccgcaacaaggctcagttactcgtcttacttactctgctgagcgtcctgttcagccagacgagtgcctggccactatatcgcgccccgagcgccctccgcctgggtgacagaattccctttgagggggccaacgagcccgatcaggttagtcttaaggaagatatagacatgctgcagaatgcgcttgcagaaaatgataccccatactacgacgtttcaagaaacgcacgacatgccgacggtgtgttcaccagtgactttagtaaactccttggtcagctcagtgctaagaaatatctggagtctctaatgggcaagagagtaagctcaaacattagcgaagatccagtgcccgtcaagaggcatagcgacgcagtcttcaccgataattacaccaggctgcgcaagcagatggccgttaagaagtacctcaattcaattctcaacggaaagcggtcttccgagggggagtcacccgacttcccagaagagttggaaaaa

SEQ ID NO: 21047 - DNA, 510 bp, synthetic construct
  misc_feature 1..510: note = source = /note="Description of Artificial Sequence: Synthetic coding sequence"
  source 1..510: mol_type = other DNA
atggacactcgcaataaggcgcagctgctcgtgctgttgaccctgctgagcgtgctgttctctcaaacctcagcttggccgctctaccgcgccccgtccgctttgcgcttgggggaccgcatccctttcgaaggagccaacgagccggaccaggtttccctcaaagaggacattgatatgctgcagaacgcgctcgcagaaaacgacacgccgtactatgatgtgtcccgcaatgcacggcacgccgacggtgtctttacctcggatttcagcaagttgctgggccaactctctgcgaagaagtacctcgagtcgctcatgggaaaacgcgtgtcgtcgaacatctccgaggacccagttcccgtcaaacggcattcagacgccgtctttacggataactacacccggctgcggaagcaaatggccgtgaaaaagtatctgaactccatccttaatggcaagaggtcgtccgaaggagaatcccccgatttcccagaggagctggagaaa

SEQ ID NO: 21048 - DNA, 510 bp, synthetic construct
  misc_feature 1..510: note = source = /note="Description of Artificial Sequence: Synthetic coding sequence"
  source 1..510: mol_type = other DNA
atggacactcggaacaaggcccaactgctggtactcctgacccttttaagcgtactcttttcacagacatctgcttggcctctgtaccgcgctccctcagccctgagattgggcgataggatcccttttgagggggccaatgagcctgaccaggtttccttgaaggaggacatcgacatgttgcagaatgccctggccgagaacgacacgccgtattacgacgtatctcgcaacgcaaggcatgccgacggagtgttcacatcagacttcagcaagctgctggggcagctttcagctaaaaaatatctcgagtccctcatgggaaagcgtgtgtcatccaatatatccgaggacccggtcccagtgaagcggcacagcgatgccgtgttcacagataactacacaagattgaggaagcagatggcagtgaaaaagtatctcaactccatactcaatggcaaaagatcctctgagggtgagtctccagatttccctgaagagctcgaaaag

SEQ ID NO: 21049 - DNA, 510 bp, synthetic construct
  misc_feature 1..510: note = source = /note="Description of Artificial Sequence: Synthetic coding sequence"
  source 1..510: mol_type = other DNA
atggacacccgcaataaagctcagcttttggtgctgctgactctgctgagcgtgctcttctcccaaacttccgcctggccgttgtatcgcgctccgtctgccctccggctgggtgaccggatcccgttcgaaggggcaaatgagcctgatcaggtgtcgctcaaggaagatatcgacatgctgcaaaacgccctggctgagaatgatactccttactacgacgtgtccaggaacgcacgccatgcggatggggtttttacttcagatttcagcaaacttctggggcagttgagtgctaagaagtaccttgaatctcttatgggaaagcgggtgtcgtcaaacatctcggaggacccagtcccagtgaagagacactccgatgcagtgtttaccgacaattacaccaggctcaggaagcaaatggccgtgaagaaatacttgaactccatcctcaatggaaagcggtccagcgaaggcgagagcccagatttccctgaagagctcgaaaaa

SEQ ID NO: 21050 - DNA, 510 bp, synthetic construct
  misc_feature 1..510: note = source = /note="Description of Artificial Sequence: Synthetic coding sequence"
  source 1..510: mol_type = other DNA
atggatactagaaataaagcacagctgctcgtgcttttgacactgcttagtgttttatttagccagacttccgcctggccattgtacagggcgccttcggcccttagactgggagaccgcattccattcgaaggagctaatgagccagatcaggtgtcacttaaagaggacattgacatgttacagaatgcgctcgctgagaatgatacgccctattacgacgtaagcaggaacgccagacacgccgacggcgtatttacttcagacttttccaaactgctcggccagctgagcgcgaaaaaatacctggagtcactgatgggtaaacgggtgagctccaatatcagcgaagatcccgtgcctgtgaaacggcactccgacgccgtgtttaccgataattataccaggctgcgcaaacagatggcggtaaaaaagtaccttaactctatcctcaatggtaaacgcagttccgaaggagagagccccgacttccctgaagaattggagaag

SEQ ID NO: 21051 - DNA, 510 bp, synthetic construct
  misc_feature 1..510: note = source = /note="Description of Artificial Sequence: Synthetic coding sequence"
  source 1..510: mol_type = other DNA
atggatacccgtaacaaagcccagctgttggtgctcctcaccctgctttcggtccttttctctcaaacttccgcgtggcctctgtaccgcgccccaagcgcactccgcctcggagatcggatccccttcgaaggcgccaatgaaccggaccaggtgagcctgaaagaggatatcgacatgctccagaacgcccttgcagagaatgataccccgtattatgacgtgtcgcgcaatgcgcgccatgctgatggagttttcacctcagacttctccaaactgctcggacaactgtcggctaaaaagtacctggaatcgttgatgggaaagagagtgagttcgaacatttccgaggaccctgtacctgtcaagcggcattcagacgccgtgtttaccgataactacaccagactccgcaaacagatggcggtgaagaagtacctcaattccatcctgaacgggaagaggtcgagcgagggcgaatcgccagacttccccgaagagctggaaaag

SEQ ID NO: 21052 - DNA, 510 bp, synthetic construct
  misc_feature 1..510: note = source = /note="Description of Artificial Sequence: Synthetic coding sequence"
  source 1..510: mol_type = other DNA
atggacactagaaacaaggcccagctgctcgtgcttctgactttactgtcagttcttttttcacagacctccgcctggccattatacagagcccccagcgcgttacggctgggcgacagaatcccgttcgagggggcgaacgagcccgatcaagtgagcttgaaagaagatattgacatgctgcagaatgctcttgccgaaaatgacacgccctactacgatgtatcacgaaatgcccgccacgcagacggagtcttcacatccgatttctctaagcttttaggacagttgtcagctaagaaatacctggagagccttatgggtaagcgagtgagctctaacataagcgaggaccccgtgcccgtgaagaggcattccgatgccgtttttaccgataactatactcgcctcagaaaacaaatggctgtgaagaagtacttgaacagcatactcaatgggaagcgcagcagtgagggtgagtcaccagatttccccgaggaactggagaaa

SEQ ID NO: 21053 - DNA, 510 bp, synthetic construct
  misc_feature 1..510: note = source = /note="Description of Artificial Sequence: Synthetic coding sequence"
  source 1..510: mol_type = other DNA
atggataccagaaataaggcgcaactgcttgtcctcctcactcttctgtccgtcctcttttcccaaacgtcagcatggccactctatagagcaccttcagcgctccgtctgggtgatcgcattcctttcgagggagccaacgaacctgatcaagtgtcgcttaaggaagatatcgacatgctccagaacgcactcgcagaaaacgatactccttactacgatgtgtctcgcaacgcacgccatgcggacggggtgtttactagcgatttctctaagctgcttgggcagctttcagccaagaagtacctggaatccctgatggggaaacgcgtgtcgtccaacatttcagaggaccccgtgcccgtgaagagacactccgatgcggtgttcaccgacaactatacccgactgcggaagcagatggcagtcaaaaagtacctcaactcgattcttaatggtaagaggtcgtcagagggagaatcccctgatttcccggaggaattggagaag

SEQ ID NO: 21054 - DNA, 510 bp, synthetic construct
  misc_feature 1..510: note = source = /note="Description of Artificial Sequence: Synthetic coding sequence"
  source 1..510: mol_type = other DNA
atggatacccggaacaaagcccagctgttggtgttgctgacactgcttagcgtgttgttcagccagacgtctgcatggccactttacagggcaccgagcgccttgcggctgggggacagaatccccttcgaaggtgccaacgaaccagaccaggttagcctcaaagaggacatcgacatgcttcaaaatgccctggcggaaaatgatactccctactatgatgtgagtaggaacgctagacatgctgacggtgtctttacaagtgatttttcgaaactgttaggccagttgtccgccaagaagtatttggagtccctgatggggaagcgtgtctcctcgaacatttccgaggacccagttcccgtaaaacggcatagcgatgctgtttttacagacaattacactagactgagaaaacagatggctgtcaagaaatacctgaatagcatcctgaacgggaagaggtccagcgagggcgaatcacctgatttcccagaggagcttgaaaaa

SEQ ID NO: 21055 - DNA, 510 bp, synthetic construct
  misc_feature 1..510: note = source = /note="Description of Artificial Sequence: Synthetic coding sequence"
  source 1..510: mol_type = other DNA
atggatactaggaataaggcccagctgctggtcctccttaccttgctgtctgtcttgttctcacagacatctgcgtggccgctctacagagccccaagtgcactgaggctgggtgatcgaatcccattcgagggagccaatgagccagatcaggtttccctgaaggaggatatcgacatgctgcagaacgccctggcagagaacgataccccctactatgatgtgagccgaaatgcacgccatgctgatggggtattcacatccgactttagcaaactccttgggcagctctccgctaagaaataccttgagtctctgatgggcaaacgcgtgagcagcaacatctccgaggatcctgtccctgttaaacgccatagcgatgcagtctttacagataattatacacgccttaggaaacaaatggctgtgaaaaagtatctcaactcaattttgaacgggaaaaggagtagcgaaggtgagtcacccgattttccagaggaactggagaag

SEQ ID NO: 21056 - DNA, 510 bp, synthetic construct
  misc_feature 1..510: note = source = /note="Description of Artificial Sequence: Synthetic coding sequence"
  source 1..510: mol_type = other DNA
atggatacaaggaacaaggctcagctacttgttctgctaactttgctctctgtgttgttttctcagacttccgcctggcctctttatagggcaccctcagctctgcgactcggagataggattccattcgaaggagccaatgaacccgatcaggtttctttgaaagaggatatcgatatgctacagaacgccctggccgaaaatgacactccttactatgatgtttctagaaatgctaggcatgctgacggggtctttacatccgatttctctaaacttctagggcagcttagtgccaaaaaatatcttgaatcattaatggggaaacgagtgtctagtaatatctctgaggatccagtccccgtaaaaaggcattctgatgccgtctttacagataattacacacgcctcaggaagcagatggcagtcaaaaagtacctaaactccattctcaacgggaaaagaagttccgaaggagaatcaccagactttcccgaagaactagaaaaa

SEQ ID NO: 21057 - DNA, 510 bp, synthetic construct
  misc_feature 1..510: note = source = /note="Description of Artificial Sequence: Synthetic coding sequence"
  source 1..510: mol_type = other DNA
atggacacgcggaataaggctcagctgctcgtactcctgacgttgcttagcgtgctgttcagccagacatctgcatggccactttatcgagctccctccgcacttcggttgggggatagaattcccttcgaaggtgctaacgagccagatcaggtatctctgaaggaggacatagatatgttgcagaacgccttggcagagaacgatacaccatactacgatgtgtcacggaatgcaaggcacgcggatggagtgttcacttccgacttctctaagcttcttgggcaactgagtgccaagaagtacctcgagagtctcatgggaaaaagggtcagttctaatatctctgaagatccggtcccagtgaaaaggcactctgacgctgtcttcacagataattatacccgattgagaaaacagatggcggtcaagaaatatttgaacagcatactgaatggcaaacgctcatccgaaggtgagagtccggattttcctgaagaactggaaaag

SEQ ID NO: 21058 - DNA, 510 bp, synthetic construct
  misc_feature 1..510: note = source = /note="Description of Artificial Sequence: Synthetic coding sequence"
  source 1..510: mol_type = other DNA
atggacacccgcaacaaggcccaactgctggtgttgctcaccctgctgtcagtgcttttttcccagacttcggcctggcccttgtaccgagccccgtcggccctgaggctgggagacagaatcccgttcgaaggggcaaatgagccagaccaagtctccctgaaggaagatatagacatgctgcaaaacgccttggcggaaaacgatactccgtactacgatgtttcacgaaatgctaggcatgcggatggcgtgttcacctccgacttctcaaaactcctgggtcagttgtcggcgaagaagtacctggaatccctcatgggaaagagagtgtcgtccaacatctccgaggatccggtgcctgtcaaaaggcactccgacgcagtctttaccgataactacactcggctgcgcaagcagatggctgtaaagaaatatctcaattcgattctcaacggaaaacggtccagcgaaggggagtcgccagacttcccagaggagttggaaaag

SEQ ID NO: 21059 - DNA, 510 bp, synthetic construct
  misc_feature 1..510: note = source = /note="Description of Artificial Sequence: Synthetic coding sequence"
  source 1..510: mol_type = other DNA
atggacactcggaacaaagcccagcttctggtgctactgacactgctctcagtactcttctcccagacaagtgcttggcctctctatcgcgcacccagcgcgctgcggctgggtgacagaatccccttcgagggtgctaacgaacctgatcaagtgtccctgaaagaggatatcgacatgctccagaatgccctagctgaaaacgacacaccgtactatgatgtaagccgtaacgcccggcacgctgacggcgtcttcaccagtgacttctcgaagctgttaggccagctgtctgccaaaaagtatttggaatccctgatgggcaaacgggtttcatccaacatttctgaggatcctgtgcccgttaagcgccatagcgacgccgtgtttacagataactatacaaggctgagaaagcaaatggccgtaaaaaagtacctgaatagcatcctgaacggtaaacgaagcagtgagggggagtcacccgacttcccagaggaactcgagaag

SEQ ID NO: 21060 - DNA, 510 bp, synthetic construct
  misc_feature 1..510: note = source = /note="Description of Artificial Sequence: Synthetic coding sequence"
  source 1..510: mol_type = other DNA
atggacacccgcaacaaagcccagctgctggtcctgttgacgctcctttcggtgcttttctcacagacttctgcatggccgctctacagagcgccgtcggccctgaggctgggagatcgcatcccattcgaaggcgctaatgaacctgaccaggtcagcctcaaggaggatatcgacatgctgcagaacgcgctggccgagaacgacaccccgtactatgacgtgtccaggaacgctcgccacgctgatggggtgtttacctcggacttctcgaagttgctcggacaactctcagcgaagaaataccttgaatccctgatgggaaagagggtgagtagtaacatcagcgaggatcccgtccctgtcaagcgccatagcgatgccgtgttcactgacaattacactcggttgcgaaaacaaatggccgtgaaaaagtacttgaatagcattctgaacggtaagcggagcagcgaaggcgaaagtccggattttccagaggaactcgaaaag

SEQ ID NO: 21061 - DNA, 510 bp, synthetic construct
  misc_feature 1..510: note = source = /note="Description of Artificial Sequence: Synthetic coding sequence"
  source 1..510: mol_type = other DNA
atggataccagaaacaaggcccagctgcttgtgctccttaccctgctgtccgtgctgttttcacaaacttccgcgtggccactctacagggcaccttcggcccttcgattgggcgatcggatcccatttgagggagcaaatgagccggatcaagtctcgctgaaagaggatattgatatgctgcaaaacgcactcgcagagaacgacactccttactacgacgtgtccagaaatgctagacacgcagatggagtgttcaccagcgatttctcgaagttgctgggacaactgtcggcaaagaaataccttgaatccctgatgggcaaaagagtgtcctcgaacatttcagaggaccctgtcccagtgaaacgccatagcgatgcagtgtttaccgacaattacactcgacttaggaaacagatggcagttaagaagtatcttaacagcattctgaatggtaagaggtcaagcgaaggggaatcgcctgattttccagaagagctggaaaag

SEQ ID NO: 21062 - DNA, 510 bp, synthetic construct
  misc_feature 1..510: note = source = /note="Description of Artificial Sequence: Synthetic coding sequence"
  source 1..510: mol_type = other DNA
atggatacaagaaacaaagcccagctgctggttctgcttacgctcttgagcgtgcttttttcccagacgagcgcctggcccctgtatcgggcgccttctgctctcaggctgggtgaccggatccctttcgagggtgctaatgagcctgatcaggtgtctctgaaggaggatattgacatgctccagaatgcccttgccgaaaatgatacgccctattatgatgtgtcccggaatgcaagacacgcggacggcgtgtttacaagcgacttcagcaagctccttggccagctcagcgctaagaaatatctggagagcttaatgggcaagcgcgtctcctccaatatctctgaggaccctgtaccagtcaagaggcactcagacgctgtttttaccgataattacacacggctgcgtaagcagatggcagtcaaaaaatatctgaactcgatcttgaatgggaaacggtccagtgagggggagagccctgattttccggaggaacttgagaaa

SEQ ID NO: 21063 - DNA, 510 bp, synthetic construct
  misc_feature 1..510: note = source = /note="Description of Artificial Sequence: Synthetic coding sequence"
  source 1..510: mol_type = other DNA
atggatacccgtaataaagcacagctgcttgttctgctgactctgctgtccgtgctgttctcccaaacatcagcctggccattgtaccgtgctcctagcgcattgagacttggcgaccgtattccctttgagggcgccaacgagcccgatcaggtcagcctgaaagaagatatcgacatgttgcagaatgccctcgcagagaatgacaccccctactatgatgtcagccgtaatgccaggcacgctgacggcgttttcacaagcgacttcagcaaactgttgggtcagctgagcgccaagaagtacctggagagccttatgggaaagagggtgagctcaaatatctccgaagacccagtacctgttaagaggcactcagatgctgtgttcacagataattatactcgtctgaggaaacagatggccgtcaagaagtacctgaacagcattttgaatggcaagcgttccagcgaaggtgaatcccctgacttccctgaggagctggagaag

SEQ ID NO: 21064 - DNA, 510 bp, synthetic construct
  misc_feature 1..510: note = source = /note="Description of Artificial Sequence: Synthetic coding sequence"
  source 1..510: mol_type = other DNA
atggacacccgaaataaggcacagctgctcgtactgctgactcttctgtccgttctcttttcccaaacttctgcctggcccctttacagagccccctctgcgctacgactcggagaccgaatcccctttgagggcgctaatgagcctgatcaggtgagcttgaaagaagatatagatatgcttcagaacgcgctcgccgaaaatgatacaccctactatgacgtgtctcgcaatgctcgccatgctgatggcgtgttcacctctgacttttccaaactgctggggcagctttccgctaaaaagtacttagaatccttaatggggaagagagtgtccagcaacattagcgaggaccccgtaccggtcaaacggcactctgatgctgtgttcacagataattacacacggctgaggaagcaaatggccgtgaagaagtacctcaactcaattctgaacggaaaacgttcgtctgagggggaatctccagacttccctgaggagctcgaaaaa

SEQ ID NO: 21065 - DNA, 510 bp, synthetic construct
  misc_feature 1..510: note = source = /note="Description of Artificial Sequence: Synthetic coding sequence"
  source 1..510: mol_type = other DNA
atggacactaggaacaaggctcagcttttggtgctgctgaccctcctgtcggttttgttcagccaaacctccgcatggccgctttaccgcgcaccctctgccctgcggcttggggaccgcattccgttcgaaggagccaatgaaccggaccaggtgtcactgaaagaggacatcgacatgctgcagaatgccctggctgaaaatgatactccatactacgacgtatcccgaaacgcgagacacgctgatggagtgttcacttcggattttagcaagctcttgggccaactctccgcgaagaagtacctggagtcactgatgggcaagagagtgtcatcgaacatcagtgaggacccggtgcctgtgaagcgccattcagacgcggtgtttaccgataactacacgcgtctgcggaaacagatggccgtcaagaagtatttgaactcgatcctcaacggaaaacgctcctctgaaggagaatcaccagacttccctgaggagctcgaaaaa

SEQ ID NO: 21066 - DNA, 510 bp, synthetic construct
  misc_feature 1..510: note = source = /note="Description of Artificial Sequence: Synthetic coding sequence"
  source 1..510: mol_type = other DNA
atggatacgagaaacaaagctcagctgttggtgctgcttacgcttctgagcgtgctgttcagccaaactagtgcatggcccctgtaccgggccccgtctgcactgaggctgggcgataggatacccttcgaaggggccaacgagccagatcaggtgtcattgaaggaggacatcgacatgctgcagaacgctcttgccgaaaatgatactccgtactacgatgtgagccggaatgctcgtcacgccgatggggtgtttacgagtgacttttcaaaactgcttgggcagctgagcgccaaaaaatacctggagtccctgatgggaaaacgtgtcagttctaatatcagtgaggacccagtgcccgtaaaaaggcattctgatgccgtgtttacggacaattataccagactgcgaaagcagatggccgtgaaaaagtacctgaactccatactgaacggtaagcgctctagcgagggtgagtccccggactttcccgaggagttagagaag

SEQ ID NO: 21067 - DNA, 510 bp, synthetic construct
  misc_feature 1..510: note = source = /note="Description of Artificial Sequence: Synthetic coding sequence"
  source 1..510: mol_type = other DNA
atggataccagaaataaggcacagttgctggtgcttcttaccctcctttcggtgcttttctcgcaaacttcggcgtggccgctgtaccgggcaccttcagcattgcggcttggggaccggattccgtttgaaggtgcaaacgagcctgaccaagtgtcccttaaggaagatattgatatgctgcaaaatgcgcttgcagaaaacgataccccttactacgacgtgtcgcggaacgcgcgccacgcagacggcgtgtttaccagtgacttctcgaaactcctggggcagttgtcagctaaaaagtaccttgaatcactcatgggcaagagagtgtcctcaaacattagcgaagatcctgtgccagtgaagcggcatagcgacgccgtctttactgataactatacgagactgcgaaaacagatggcagtcaagaaatacctgaattcgatactgaacggaaaacggtcgagcgagggagaatcgccagattttccagaggaactcgagaaa

SEQ ID NO: 21068 - DNA, 510 bp, synthetic construct
  misc_feature 1..510: note = source = /note="Description of Artificial Sequence: Synthetic coding sequence"
  source 1..510: mol_type = other DNA
atggacactaggaacaaagctcagctgctcgtccttctcactctgctatccgtcctttttagccagacatccgcttggccattatacagagccccttccgccctgaggcttggggatcgaatacctttcgagggcgctaacgagcctgaccaagtttccctgaaagaggacatcgacatgctgcaaaacgccctggccgaaaacgacaccccatattacgatgtttcccggaacgccaggcacgccgacggagtgttcacctccgattttagcaaactgctggggcagctctcggcgaaaaaatacctcgagtcccttatgggcaagcgagtgtcttccaacatctctgaagaccctgtacccgttaagaggcacagcgatgccgtatttactgacaattacacgaggctgcgcaaacagatggctgtgaaaaagtacctcaactcaatattgaacggaaaacgcagtagcgagggcgaaagtccagactttcccgaagagctagaaaag

SEQ ID NO: 21069 - DNA, 510 bp, synthetic construct
  misc_feature 1..510: note = source = /note="Description of Artificial Sequence: Synthetic coding sequence"
  source 1..510: mol_type = other DNA
atggatacccgaaataaggcccagttgcttgtgctgctgacccttctctccgtgcttttttcacaaacgtcagcttggccactttaccgggcccctagcgctttgcgtcttggagatcgtattccgttcgagggggccaacgaaccagaccaggtgtcccttaaggaggacattgatatgctgcaaaacgcgcttgccgaaaacgatactccttactatgatgtgtctcgaaatgcgagacatgctgacggcgtgtttactagcgacttctcaaagctcctggggcagctctctgccaagaagtaccttgaatcgttgatgggaaagcgtgtctcgtcgaacatcagcgaggaccctgtgccagttaagagacactccgatgcggtctttaccgacaattacaccagactgagaaaacaaatggcagtcaaaaagtacctgaactcgattctgaatggtaaaaggtcctccgaaggtgaatcacccgattttcccgaagagctggagaag

SEQ ID NO: 21070 - DNA, 510 bp, synthetic construct
  misc_feature 1..510: note = source = /note="Description of Artificial Sequence: Synthetic coding sequence"
  source 1..510: mol_type = other DNA
atggacacccgaaataaggcgcaactactcgttctgcttactcttcttagcgttctgttctctcaaacaagtgcctggcctttgtaccgggcaccttccgcacttcggttgggtgacagaattccttttgagggggcaaacgaacctgaccaggtgagcctcaaggaggacatagatatgctgcaaaatgccctggccgagaacgatacaccctattatgatgtgtcgcggaacgcgaggcacgctgacggagtcttcaccagcgactttagtaagttgctgggacagttgagtgcgaagaagtacctggagagtcttatgggcaagagggtttctagtaatatttccgaagaccccgtcccggttaaacgccactcggacgcggttttcaccgataattacaccaggctaaggaaacagatggccgtgaagaagtacctgaactccatcctgaacggcaagcgcagctctgaaggtgaaagcccagatttccctgaggagcttgagaaa

SEQ ID NO: 21071 - DNA, 510 bp, synthetic construct
  misc_feature 1..510: note = source = /note="Description of Artificial Sequence: Synthetic coding sequence"
  source 1..510: mol_type = other DNA
atggatactcgcaataaggcccaattactggttctgcttaccctgctgagcgtcctgttttcgcagactagtgcctggcccctgtaccgagcccccagcgcgctgagactgggggatcggattccgttcgagggcgccaacgagccagatcaggtgtctcttaaggaggatatcgatatgctgcagaatgctctggcggaaaatgacacaccatattatgacgtgtccaggaatgcaaggcatgcggacggggtattcacaagcgatttttctaagttgctcggacagctctctgcaaagaagtatctcgagagtctgatgggtaaacgcgtcagctcaaacatctccgaggaccccgtgcccgtcaagagacatagtgatgccgtcttcaccgacaactacaccaggttaaggaaacaaatggctgtgaagaagtatctgaatagtatcctaaatggtaagcggagctctgaaggcgaaagtccagattttcctgaggagttggaaaag

SEQ ID NO: 21072 - DNA, 510 bp, synthetic construct
  misc_feature 1..510: note = source = /note="Description of Artificial Sequence: Synthetic coding sequence"
  source 1..510: mol_type = other DNA
atggatactcgcaacaaagcccaactcttggtgcttctcaccctgctctcggtgctgttctcacagaccagcgcatggccgttgtaccgcgccccctcggccctgcggctgggagacagaatcccgttcgagggtgcgaacgagccagaccaggtgtcgcttaaggaggatatcgatatgcttcagaacgccctggccgagaacgatactccgtactacgacgtctcgagaaatgcccggcacgcggatggagtctttacctcggacttctcgaagctgctgggccaactgtcagcgaagaaatacctcgagagcctgatgggtaagcgggtgtcctccaacatctccgaggaccccgtgccggtaaagcgccactccgacgccgtctttactgataactacactagactgcggaaacaaatggctgtgaagaagtacctgaacagcattctcaatggcaaaaggagcagcgagggagagtcccccgacttcccggaagagctggagaag

SEQ ID NO: 21073 - DNA, 510 bp, synthetic construct
  misc_feature 1..510: note = source = /note="Description of Artificial Sequence: Synthetic coding sequence"
  source 1..510: mol_type = other DNA
atggacacacgcaacaaggcccagctcctggtgctgctgaccctgctgtctgtactcttttcccaaacgagcgcttggcctctgtatagagctccctccgcccttagactcggagacaggataccttttgagggagcaaacgaacccgatcaggtatcactgaaggaagacattgatatgctgcagaacgctctcgctgagaatgacaccccctattacgacgtttctagaaatgctaggcacgcagacggcgtgtttacatccgacttcagcaagctgttgggtcaattgtccgctaagaagtatcttgagagccttatgggcaagagggtctcctctaatattagtgaagatccagtgccagtcaaaagacatagcgacgccgtttttaccgataactacactagattgcgcaagcagatggccgtcaagaagtacttgaattccatccttaacggcaaaagatctagcgagggcgagtccccagactttccggaggaactcgaaaag

SEQ ID NO: 21074 - DNA, 510 bp, synthetic construct
  misc_feature 1..510: note = source = /note="Description of Artificial Sequence: Synthetic coding sequence"
  source 1..510: mol_type = other DNA
atggataccaggaataaagcccagctcctggtcctcttgactctgctgagtgttctgttctcccagacctccgcttggccgctctaccgcgcgcctagtgccctgagacttggcgatagaattcccttcgagggggccaatgaacccgaccaggtcagtctgaaagaggacatcgacatgctgcaaaatgctctcgccgagaacgatacaccgtattacgacgtgagtaggaacgccaggcatgcggacggggtgttcacatctgatttctccaagctgctcggccagctgagcgctaagaagtacttggagagccttatgggcaaacgcgtctcatcaaacatctcagaggatcccgtccctgtcaaacgccactcagacgccgtatttacggacaattacactcgcctgagaaaacagatggccgtgaagaagtacctgaattcaatcctgaacggcaagcggtcaagcgagggagaatctcccgactttcccgaggaactcgagaaa

SEQ ID NO: 21075 - DNA, 510 bp, synthetic construct
  misc_feature 1..510: note = source = /note="Description of Artificial Sequence: Synthetic coding sequence"
  source 1..510: mol_type = other DNA
atggacacccggaacaaggcgcaactgcttgtcctgttgactctgctgtcagtcttgttctcccagacctcggcctggcccctttacagagcaccttcggccctgcgcctcggagatcgcataccatttgaaggagctaacgaaccggaccaagtgtcgctcaaagaagatatcgacatgctgcaaaacgcccttgcagaaaacgacaccccttactacgacgtgtcaagaaatgcacgacacgcagatggcgtctttacgtctgatttttctaaactgcttggtcaactgtcggcaaagaaatacctcgaatcgttgatgggcaagcgcgtgtccagcaacattagtgaagatcctgtcccagtgaaacggcattcggatgcagtgttcaccgataactacaccaggctcaggaaacagatggccgtgaagaaatacctgaattccattctgaacggcaagcgatcgtcagagggggaatcgcccgatttccctgaggagctcgagaag

SEQ ID NO: 21076 - DNA, 510 bp, synthetic construct
  misc_feature 1..510: note = source = /note="Description of Artificial Sequence: Synthetic coding sequence"
  source 1..510: mol_type = other DNA
atggatacccggaataaagcacagctgctcgtgctgttgactctcctctcggtgctgttttcccagacttcagcctggccactgtaccgcgcaccgtcggcactgcggctcggcgatcggattcccttcgagggcgctaatgaaccagaccaggtgtcgctcaaggaggatattgacatgctccaaaatgccctggccgagaacgacactccgtactacgacgtgtcgcgcaacgcacgacatgcagacggcgtgttcacctctgacttcagcaagctgctgggtcagctgtccgcgaagaagtacctggaatccctcatggggaagcgcgtgtcgtcaaacatctccgaagatcctgtcccagttaagcgccactcggatgcggtgttcactgacaactacaccagactcaggaaacagatggccgtgaaaaagtacctgaactcgatcctcaacggaaagaggtcaagcgagggtgaatcccctgacttcccagaagaactggaaaaa

SEQ ID NO: 21077 - DNA, 510 bp, synthetic construct
  misc_feature 1..510: note = source = /note="Description of Artificial Sequence: Synthetic coding sequence"
  source 1..510: mol_type = other DNA
atggacacacgtaataaagcacagcttttggtgctgcttacactgctgagtgtactgttttctcagacaagcgcttggcccttatatagggcaccaagcgccttaaggctgggggacaggattccgttcgaaggggcgaatgagcccgaccaggtctcgctgaaggaagacattgacatgctacagaacgctctcgctgagaacgacacgccgtattacgacgtaagtcgcaacgctcgccatgctgacggggtgttcacttccgatttctccaagctgctcggacaactgtctgccaagaaatatctggagtcgttgatgggcaaacgcgtgtctagtaacatatccgaggaccccgtcccagtcaagcggcattctgacgcagtattcacagacaactacactcggttaaggaagcagatggctgtgaagaagtacctgaatagtatcctgaatggtaagaggtcctcagagggtgaatcaccagacttcccagaggaattggagaag

SEQ ID NO: 21078 - DNA, 510 bp, synthetic construct
  misc_feature 1..510: note = source = /note="Description of Artificial Sequence: Synthetic coding sequence"
  source 1..510: mol_type = other DNA
atggacacacgcaataaggcccaactactggtacttctaacgttattgtctgtactttttagccagacatcagcttggcctctttaccgggctccatctgccttgagacttggtgatcggattcccttcgaaggagcgaacgagcccgaccaagtgtcattgaaagaagatatagatatgttgcagaatgctctcgccgagaatgatactccttattatgatgttagtcgtaatgctcgacatgcagatggtgtttttactagcgatttttctaaattgttgggtcaactctcagctaaaaaatacctggagtcacttatgggtaagagagtatcatccaatataagtgaagatcctgtgcctgtgaaaaggcatagcgacgctgtatttactgataactacactcgtcttaggaaacagatggccgttaaaaaatacttgaatagcattctcaacggtaaaaggagttcagagggagagtcacctgacttcccagaggaacttgaaaag

SEQ ID NO: 21079 - DNA, 510 bp, synthetic construct
  misc_feature 1..510: note = source = /note="Description of Artificial Sequence: Synthetic coding sequence"
  source 1..510: mol_type = other DNA
atggacaccagaaacaaagcccaattgttggtgctgctcaccctcctgagcgtccttttctcccagacttcggcctggccactgtacagggccccatccgccctccgacttggtgacaggattccttttgaaggggctaacgagccggaccaagtcagcctcaaggaagatatcgacatgctgcaaaacgctctggctgaaaatgataccccctactacgatgtctcgcggaacgcacggcatgccgatggagtgttcacctcggatttttccaagttgcttggacagctgagtgccaaaaagtatctggagtcgctcatggggaagagagtgtcatccaacatctcggaggacccggtgccggttaagagacactcggacgcagttttcacggacaattacactcgtttgagaaagcagatggcagtgaagaagtacctcaattccatcttgaatggaaaacgcagcagcgaaggagagtcgccggacttcccggaagaacttgagaag

SEQ ID NO: 21080 - DNA, 510 bp, synthetic construct
  misc_feature 1..510: note = source = /note="Description of Artificial Sequence: Synthetic coding sequence"
  source 1..510: mol_type = other DNA
atggacacacgtaataaggcacagcttctagtgctgctcaccctgctcagcgtcctgttctcccagactagcgcatggcccctgtatcgcgccccctctgccttgaggctcggagacaggataccgtttgagggtgcgaatgaaccggaccaggtttctttgaaggaggatatcgacatgctccagaatgcgttggctgagaacgatactccctactacgacgtttcaagaaatgccagacacgctgatggagtatttacatccgatttctccaagctacttggacaattgtctgctaagaaatacctggaaagcctgatgggaaaaagggtgagttcaaatatcagcgaagaccctgtgcccgtgaaacgccactctgatgcagtgtttaccgataattatacacgtttaagaaagcagatggccgtcaagaaatatctcaacagtattctgaacggcaaacgtagcagcgagggtgaaagtcccgacttcccagaagaactggaaaag

SEQ ID NO: 21081 - DNA, 510 bp, synthetic construct
  misc_feature 1..510: note = source = /note="Description of Artificial Sequence: Synthetic coding sequence"
  source 1..510: mol_type = other DNA
atggacactaggaacaaggctcagctacttgtgctcttaactctcctcagcgtcctgtttagccaaacatcagcgtggccactgtaccgcgccccatcggctctgcggctaggcgacaggattccatttgaaggcgctaatgagcccgatcaggtatcactcaaggaggacatcgatatgttgcagaatgcactcgccgagaatgacactccctattatgatgttagtcgcaacgcccgacacgctgatggggttttcacaagcgattttagcaaactcctcggacagttgtctgcgaaaaagtacctcgagagtctgatgggtaaacgggtgtctagtaacattagtgaggaccctgtcccggtgaaacggcatagcgacgccgtgtttaccgataattatacacggctaagaaaacagatggccgtgaaaaaatacctgaactccatcctgaacggaaaaaggagctccgagggcgagtcacctgactttcccgaagagcttgagaag

SEQ ID NO: 21082 - DNA, 510 bp, synthetic construct
  misc_feature 1..510: note = source = /note="Description of Artificial Sequence: Synthetic coding sequence"
  source 1..510: mol_type = other DNA
atggacaccagaaacaaggcccagttgttggtgctcctaaccctgttgagtgttcttttctcccagacctccgcctggcccctgtatcgagctccctctgctttgcgcctcggagatcgtatccccttcgagggcgctaatgagcccgaccaggtgtccctgaaagaagatatcgatatgttgcaaaatgcgctggccgagaacgacaccccctactatgatgtgagccggaatgctagacacgctgacggggtgtttacctcagacttctcaaagctccttgggcagctttcggcaaagaagtatcttgagtcccttatgggcaagagggtttcatctaacattagcgaagacccagtgcccgtcaaacgtcacagtgatgctgtgttcactgacaactatacccgccttaggaagcagatggctgtaaaaaagtacttaaattctattttgaatgggaaacggagctccgagggcgagtcgcccgactttccagaagaattggaaaaa

SEQ ID NO: 21083 - DNA, 510 bp, synthetic construct
  misc_feature 1..510: note = source = /note="Description of Artificial Sequence: Synthetic coding sequence"
  source 1..510: mol_type = other DNA
atggatacgcgcaataaagcacagttgctggtgctgttgaccctgctgagcgtgctgttcagccagactagtgcatggcctctgtaccgcgctccatctgccctgcgtctgggggaccgaatcccattcgaaggcgcgaatgagcctgaccaggttagcttgaaagaagacatcgatatgctgcagaacgctctggccgagaatgacaccccctactatgatgtgagccgcaacgctagacacgcggatggcgttttcacttctgatttctctaagctgctgggccagttaagcgccaagaaatacttagaaagcctgatgggtaaaagagtgtcgagcaacatcagcgaggacccagtgccggtcaagcgccacagcgacgccgttttcaccgataattacaccagactccgtaagcagatggccgtgaaaaagtatttgaatagtattcttaacggaaagcgtagctcggagggagaaagcccagactttccagaagagcttgagaag

SEQ ID NO: 21084 - DNA, 510 bp, synthetic construct
  misc_feature 1..510: note = source = /note="Description of Artificial Sequence: Synthetic coding sequence"
  source 1..510: mol_type = other DNA
atggacactcggaacaaggcacagctcctcgtcttgctgacccttctgtcagtcctgttttcgcagacttcagcctggccactgtacagagcccctagtgctctgagacttggggatcgtattcccttcgaaggtgcaaatgagcctgatcaagtgtcgcttaaagaggacattgatatgcttcaaaacgcgcttgcagagaatgataccccatactacgacgtgtcgaggaatgcacggcatgcggacggagtgttcacctcagatttttccaaacttctgggacaactttccgctaagaagtaccttgagtcattgatgggaaaacgtgtctcatcgaacattagcgaggatccagtgccagtgaaacgtcactctgatgctgtttttaccgataactataccaggctcagaaagcagatggcagtgaagaagtacctgaattcaattctgaacgggaagcggagctccgagggtgaatccccggatttccctgaggagctggaaaag

SEQ ID NO: 21085 - DNA, 510 bp, synthetic construct
  misc_feature 1..510: note = source = /note="Description of Artificial Sequence: Synthetic coding sequence"
  source 1..510: mol_type = other DNA
atggatacccgcaacaaggcacagttgctggtgctccttactctgctgtcggtgctgttctcgcagaccagcgcatggccgctgtaccgcgctccatccgctctgcgactcggagatcgcatcccgtttgaaggagccaatgagccggatcaggtgtcgctgaaggaagatattgacatgctccagaatgcccttgctgagaacgacactccctactacgatgtgtcccggaatgcaagacatgcggacggggtctttacctcggatttctccaagctgctgggacaactgtcagccaagaagtacctggagtcccttatggggaagcgcgtgagctcaaacatctccgaggacccggtgcctgtgaagaggcactcggacgctgttttcacggacaattacactaggctgagaaagcagatggctgtgaagaagtacctcaactccatcctcaacgggaagcggtcctccgagggcgaatcaccggacttcccagaggaactcgaaaag

SEQ ID NO: 21086 - DNA, 510 bp, synthetic construct
  misc_feature 1..510: note = source = /note="Description of Artificial Sequence: Synthetic coding sequence"
  source 1..510: mol_type = other DNA
atggatacgcgaaataaagcgcaactattagtactattaacgttactatcggttctattttcgcaaacgtcggcgtggccgctatatcgagcgccgtcggcgttacgtctaggtgatcgtataccgtttgaaggtgcgaatgaaccggatcaagtatcgctaaaagaagatatagatatgttacaaaatgcgctagcggaaaatgatacgccgtattatgatgtttcgcgaaatgcgcgacatgcggatggtgtttttacgtcggatttttcgaaactattaggtcaattatcggcgaaaaaatatttagaatcgttaatgggtaaacgagtatcgtcgaatatatcggaagatccggttccggttaaacgtcattcggatgcggtatttacggataattatacgcgtttacgtaaacaaatggcggtaaaaaaatatttaaattcgatattaaatggtaaacgatcgtcggaaggtgaatcgccggattttccggaagaactagaaaaa

SEQ ID NO: 21087 - DNA, 510 bp, synthetic construct
  misc_feature 1..510: note = source = /note="Description of Artificial Sequence: Synthetic coding sequence"
  source 1..510: mol_type = other DNA
atggacactcgcaacaaggcccagcttctggtgctgttgaccctcctcagcgtcctgttctcccagactagcgcctggccactgtaccgcgccccatcggccctcaggctgggcgaccggatcccgttcgaaggtgcgaatgagcctgaccaggtatcactcaaagaggacatcgacatgctgcagaacgcgctggcggagaatgatactccttactacgacgtctcgcgcaacgcgcgccatgcagatggcgtgttcacttccgacttttcaaagctgcttggccaactctccgccaagaagtacttggaatccctcatgggtaagagagtgtcaagcaatatctccgaagatcctgtcccagtgaaacgccactccgatgcagtgttcaccgacaactacaccagacttcgaaaacaaatggccgtgaagaagtacctgaattcgatcttgaacggaaagagatccagcgaaggagaatccccggactttccggaggaactggagaag

SEQ ID NO: 21088 - DNA, 510 bp, synthetic construct
  misc_feature 1..510: note = source = /note="Description of Artificial Sequence: Synthetic coding sequence"
  source 1..510: mol_type = other DNA
atggatactaggaacaaggcacaactccttgtattactcacactactcagtgtgcttttttctcagacatcggcttggccactatatagagcccctagtgctctaaggctcggggataggatacctttcgaaggggccaatgaacctgatcaggtctcactaaaagaagatattgatatgctccagaacgccttagcagaaaacgatacaccatattatgatgtttctaggaacgccaggcatgccgatggggttttcacatccgatttctccaaactcctgggacagctcagtgctaaaaaatatctagagagtctcatggggaaacgggtaagttctaacatatccgaggatcctgttccagtgaaacgccattccgatgccgtgtttactgataactatacacgactccgcaaacaaatggcggtaaaaaaatatctcaactccatacttaacggaaaacggtcatctgagggagaatcacctgatttcccagaggagcttgaaaaa

SEQ ID NO: 21089 - DNA, 510 bp, synthetic construct
  misc_feature 1..510: note = source = /note="Description of Artificial Sequence: Synthetic coding sequence"
  source 1..510: mol_type = other DNA
atggacacccgtaacaaagcccagctgttggtgctcctgactcttctgagcgtccttttttcccagaccagcgcatggcctctttacagagctccttcggcgctcaggctgggtgacagaattccattcgaaggcgctaacgaacctgatcaagtgagcctcaaggaagatattgacatgcttcaaaatgcgctggcggagaacgatactccatactatgatgtgtcccgaaacgctcgacatgcggatggtgtattcacctctgattttagcaagctgctcggacaactgagcgcaaaaaagtacctcgaatcgctgatgggcaagcgggtgtcctccaatatcagcgaagatcctgtccctgtcaaaagacactccgatgcagtgttcactgataactacactagacttcgcaagcaaatggccgtgaagaaatacttgaactccattctgaacgggaagcggtcgtcggagggagaatcacccgatttccccgaagaactggagaaa

SEQ ID NO: 21090 - DNA, 510 bp, synthetic construct
  misc_feature 1..510: note = source = /note="Description of Artificial Sequence: Synthetic coding sequence"
  source 1..510: mol_type = other DNA
atggatacgcggaacaaggcccagctgctggtgttattgacactgctgagcgtgttattcagccagactagcgcctggccactgtatcgggcccccagtgcactgagactgggagatcgaatacccttcgagggggccaacgagcccgatcaagtctccttgaaggaggacattgatatgttgcagaatgcactggccgagaatgacacaccctattatgacgtttctaggaatgcacgccatgctgacggagtatttacctcggacttcagcaagttgttaggacagttaagtgcgaagaaatatctggagtctcttatgggcaaacgggtttccagcaatataagtgaagacccagtccctgttaaacggcatagtgacgctgtgtttacagacaactatactaggttaagaaagcaaatggcagtgaaaaaatacttgaactctatcctaaatggcaaacgttctagcgagggtgaatccccagacttccccgaagaactggaaaaa

SEQ ID NO: 21091 - DNA, 510 bp, synthetic construct
  misc_feature 1..510: note = source = /note="Description of Artificial Sequence: Synthetic coding sequence"
  source 1..510: mol_type = other DNA
atggatacaaggaataaagctcagctccttgtgctgttaactttactcagcgtgctgttcagccagacatcagcatggcccctttaccgagcaccctccgcgttacgacttggggaccgtattcccttcgaaggggccaacgaaccagatcaggtatcattgaaagaggatattgacatgctgcagaacgctctcgctgaaaacgataccccatattacgatgtgtctcgaaatgctagacatgccgacggggtgtttacctctgatttctccaaactactcggccagctgagtgcaaagaagtaccttgagtctttgatggggaagagagtgtcttcaaatatcagcgaagatccagtgccagtgaaacggcatagcgatgctgtgtttaccgacaactatacccgactccggaagcagatggccgtaaaaaagtaccttaattcgatcttaaacggcaaaaggtcatctgaaggcgagtcgcctgatttccccgaggagctggaaaag

SEQ ID NO: 21092 - DNA, 510 bp, synthetic construct
  misc_feature 1..510: note = source = /note="Description of Artificial Sequence: Synthetic coding sequence"
  source 1..510: mol_type = other DNA
atggataccaggaataaggcccaactcctggtgctgctgactctgctgagcgtgttattctcgcagacctccgcttggcccctttacagggcgccctcagccttgagattgggtgacagaatccccttcgaaggtgccaatgagcccgaccaagtgagcctcaaggaggatatagacatgcttcagaatgctcttgccgagaatgacactccctactacgacgtgtcccggaatgcccgccatgctgatggcgtctttacaagtgactttagcaaactgttggggcagctcagcgcgaagaagtaccttgaaagccttatggggaaacgagtgtcgagtaacatcagtgaggaccctgttcctgtgaaaaggcattccgatgcagtattcacagataattacacgcggctgcgcaagcagatggcagttaaaaaatatctgaatagtattctgaacggcaagcgcagttcagagggggaatcacccgactttccagaagaactggagaag

SEQ ID NO: 21093 - DNA, 510 bp, synthetic construct
  misc_feature 1..510: note = source = /note="Description of Artificial Sequence: Synthetic coding sequence"
  source 1..510: mol_type = other DNA
atggacacacgcaataaagctcaattgctggtcctgttgacacttttgagtgtactcttttcccagacaagtgcctggcccctataccgcgcgccctctgctttacgccttggagataggatcccctttgagggagcaaatgagcccgatcaggttagcctgaaagaggacatcgacatgcttcaaaatgcgctggcggaaaacgataccccctactatgatgtatcgcggaatgctcgccatgctgatggagtattcacgtccgacttttccaagctgctcggccagctgtcagcgaaaaagtatcttgaaagcctcatgggaaagcgagtctcgtccaatatctcggaagatccagtaccagtaaagcgacactccgatgctgttttcactgataattacactcggctcagaaaacagatggcggtgaaaaagtatttaaattctatcctgaacggcaagcgctcatctgaaggcgaatccccagacttcccagaagaactggaaaag

SEQ ID NO: 21094 - DNA, 510 bp, synthetic construct
  misc_feature 1..510: note = source = /note="Description of Artificial Sequence: Synthetic coding sequence"
  source 1..510: mol_type = other DNA
atggatacacgcaataaggctcagctgcttgtgctcctgaccttactgtctgtgctgttcagtcaaacctcagcctggccactgtatagggcaccatctgccttgagactgggagatcgcataccatttgaaggagccaatgagccagaccaggtctccctgaaagaggatattgacatgctccaaaatgctcttgcagagaacgatactccttactatgatgtcagtagaaacgcacggcatgcagatggcgtcttcaccagcgatttttcaaagctgctcggacagctaagtgctaaaaaatacctggagtctctgatgggtaagagagtgtcctccaacatcagcgaggaccctgtgcccgtgaagcgccacagtgatgctgttttcaccgacaactacactcgcttacggaagcagatggcagtgaagaagtatctgaattctatcctgaacggaaagcgaagttctgaaggcgagagccctgatttccctgaagaattagaaaag

SEQ ID NO: 21095 - DNA, 510 bp, synthetic construct
  misc_feature 1..510: note = source = /note="Description of Artificial Sequence: Synthetic coding sequence"
  source 1..510: mol_type = other DNA
atggatacgaggaataaagctcagctgctggttctcttgacgctgctgtccgtgctcttttcacagacttcagcctggcctctctaccgggctccatccgctctgagactgggggatcgcatcccttttgagggggcaaatgagcccgatcaggtgagtctcaaggaggacatcgatatgctgcagaacgccctcgctgaaaacgataccccttattacgatgtttctagaaacgcacgacacgccgatggagtgttcacgagtgattttagcaagctgctggggcagctcagcgcaaagaaataccttgaatccttgatgggtaagagggtgtctagcaatatttcagaggatccggtccccgtcaaaaggcactcagacgctgtctttaccgacaactacaccagacttagaaaacagatggcagtgaaaaaatatctgaacagcattctcaacgggaagaggtcctcagaaggcgaatcacctgactttccagaagagctggagaag

SEQ ID NO: 21096 - DNA, 510 bp, synthetic construct
  misc_feature 1..510: note = source = /note="Description of Artificial Sequence: Synthetic coding sequence"
  source 1..510: mol_type = other DNA
atggacacccggaataaagcacagctgcttgtcctgctgaccctccttagcgtgcttttcagccagaccagcgcatggcctctctaccgggccccatcagcacttagacttggtgatcggatcccttttgaaggagctaacgagcctgatcaggtgtccctcaaggaagatatcgatatgctgcaaaatgcgctcgcagaaaacgatactccttactacgacgtctcgagaaatgcgcggcatgcagacggggtgtttacctcagacttttcgaagttgctgggccaactctccgccaaaaagtacctcgaatcccttatgggtaagagagtgtcgtcaaacatctcagaagatccagtgcccgtcaaaaggcactcagatgcagtgtttacggacaactatacccgcctgcgcaagcaaatggcagtcaagaaataccttaatagtatccttaacggtaagcgaagctcggaaggagagtccccggattttcccgaagaacttgaaaag

SEQ ID NO: 21097 - DNA, 510 bp, synthetic construct
  misc_feature 1..510: note = source = /note="Description of Artificial Sequence: Synthetic coding sequence"
  source 1..510: mol_type = other DNA
atggacacccgcaacaaagcccagctgcttgtgctgctgacccttctttctgtcctgttctcgcaaactagcgcttggccactttacagagccccctccgcactcagactgggcgatagaatcccctttgaaggcgctaatgaaccggaccaggtcagccttaaagaagatattgacatgctacaaaacgctctggcagaaaacgataccccctactatgatgttagccgcaatgctagacatgcagatggagtcttcacaagcgattttagtaagctgctgggccagctgagcgctaaaaagtacctggagagtctgatgggcaagcgggtcagtagcaatatcagcgaggacccagttcctgtgaagcgccatagcgacgcggtatttacagacaattacacacgattgagaaagcagatggccgtgaagaagtaccttaactccatcctgaacggcaagcggagcagcgaaggagagagccctgacttcccagaggaattggagaag

SEQ ID NO: 21098 - DNA, 510 bp, synthetic construct
  misc_feature 1..510: note = source = /note="Description of Artificial Sequence: Synthetic coding sequence"
  source 1..510: mol_type = other DNA
atggacactcgtaataaagcccaactattggtgttattgaccttgctttccgtgctcttttcgcaaaccagcgcctggcccctttatagggcaccctccgcactgcgtttaggggaccgcatcccattcgagggtgccaacgagccagatcaagtgtccctcaaggaggacatagatatgttgcagaacgccctggctgaaaatgacaccccctactatgacgtgtctcgcaacgcaagacacgcagacggcgtctttacttccgatttttctaagcttttgggccagctatccgcgaagaagtacctcgagtcactcatgggcaagagagtgtcctctaatatttccgaggatcccgtacccgtcaaaagacactctgatgcagtttttaccgataactatacccgattacgtaaacagatggcagtcaagaagtacctaaacagcatacttaatggaaagcgatctagcgagggtgagtccccagatttcccagaagagctggagaaa

SEQ ID NO: 21099 - DNA, 510 bp, synthetic construct
  misc_feature 1..510: note = source = /note="Description of Artificial Sequence: Synthetic coding sequence"
  source 1..510: mol_type = other DNA
atggatacgcgcaacaaggcccagctgctcgtgttgctcacccttctgagcgtgcttttctcgcagacttcggcatggcctctttaccgagctccctcagcgcttcggctgggtgatcgcattcctttcgaaggcgcaaacgaacctgaccaagtgtcccttaaggaggacatagacatgttgcaaaatgcacttgctgaaaatgataccccttactacgacgttagcaggaatgctcgacatgcagacggagtctttacctcggatttttcgaaactgctcgggcaactgagcgcaaagaagtaccttgaatcactcatgggtaagcgtgtctcatcaaatatctcggaagatcctgtgccagtgaagcgacattcggatgcagtgtttactgacaactatactcgtttgcgaaaacagatggccgtgaagaaatacctgaactctatccttaacggaaagcgttcatctgagggagaatcgccagattttccagaggagctggagaaa

SEQ ID NO: 21100 - DNA, 510 bp, synthetic construct
  misc_feature 1..510: note = source = /note="Description of Artificial Sequence: Synthetic coding sequence"
  source 1..510: mol_type = other DNA
atggacacccggaataaggcccagctgcttgtcctcctgactctgctgtcagtcctcttctcccagacttccgcctggccgctctaccgcgcaccttcagcgctgagactcggggatcgcattccgttcgagggcgccaacgagcctgaccaagtgtcgctgaaggaagatatcgacatgcttcagaatgcgctggcagagaacgacactccgtactacgatgtgagccgcaatgcccggcacgcagacggcgtgttcacttcggacttctccaaactgctgggtcaattgtctgccaagaagtatttggagtccctgatgggaaagcgcgtgtcatccaacatcagcgaggacccggtgccggtgaagcgacactccgacgcggtgtttaccgacaattacactcgcctcaggaaacagatggcagtgaagaagtacttgaactccatcctgaatggtaagagaagctcagagggtgaatcaccagattttcctgaagaactcgaaaaa

SEQ ID NO: 21101 - DNA, 510 bp, synthetic construct
  misc_feature 1..510: note = source = /note="Description of Artificial Sequence: Synthetic coding sequence"
  source 1..510: mol_type = other DNA
atggacaccagaaataaggcacagctcctggtcctcctgactctcctctcggtcctgttcagtcaaactagcgcgtggccgttgtaccgtgccccgtcagccttgcgactgggagacagaatcccattcgagggggctaacgagccggatcaggtgagcttgaaggaagatatcgacatgctgcaaaacgcattggcagaaaacgatacgccctactacgatgtgtcccgcaacgcaagacacgccgacggcgtgtttacctccgatttcagcaaactcttgggccagctctcagccaaaaagtacctggaatcgctgatgggaaaacgcgtgagttccaatatctctgaggacccggttcctgttaagaggcattcggacgctgtgttcactgacaactatacccggctgaggaagcagatggcggtgaagaaatacctgaacagcatacttaatggaaagcgctcctcggagggtgaaagcccagacttccctgaagagttggaaaaa

SEQ ID NO: 21102 - DNA, 510 bp, synthetic construct; identical to SEQ ID NO: 21081
  misc_feature 1..510: note = source = /note="Description of Artificial Sequence: Synthetic coding sequence"
  source 1..510: mol_type = other DNA

SEQ ID NO: 21103 - DNA, 510 bp, synthetic construct
  misc_feature 1..510: note = source = /note="Description of Artificial Sequence: Synthetic coding sequence"
  source 1..510: mol_type = other DNA
atggatacccgaaacaaggctcagctcctggttctcctgacgttgttgtcagtcctcttttcgcagacctcggcatggccactgtaccgcgcccctagcgctcttcgactgggagatagaatccctttcgagggtgccaacgagccagaccaagtcagcttgaaggaagatatcgatatgctccagaacgcattggcggaaaatgacaccccctactacgacgtgtcacggaacgcccgccatgccgatggcgtgttcacctccgacttctcaaagctgctgggccaactgtcggccaagaagtatctggagtccctgatgggcaaacgcgtgtcgagtaatatctcggaggatccggtgccggtgaagagacacagcgacgccgtgttcacggacaactacacgcggctgcgcaagcagatggcggtaaagaagtacctgaacagcatcctcaatggaaagcgctcctccgaaggcgagagcccagactttccggaagaactggaaaag

SEQ ID NO: 21104 - DNA, 510 bp, synthetic construct
  misc_feature 1..510: note = source = /note="Description of Artificial Sequence: Synthetic coding sequence"
  source 1..510: mol_type = other DNA
atggacactcgcaacaaggctcagctgctggtcctgcttacattactgtctgtgttgttctctcagacttctgcctggccactgtaccgagccccatccgcccttcgcctcggagaccggatcccttttgagggggctaatgaaccagatcaagtcagcctaaaggaggacatcgacatgctgcagaatgcactggccgagaacgacaccccctattacgacgtgtcaaggaacgcacgacatgccgacggcgtgttcacttcagatttcagtaagcttttggggcagctgagtgctaagaaatatctcgagtctcttatgggaaagcgcgtatctagtaatattagtgaagatccggttccagtcaagagacattctgatgcagtctttactgacaactatactagactcaggaagcagatggcagtgaaaaagtacctgaatagtattctgaacggcaagagatcctccgagggggagtccccagacttccccgaagagctagaaaaa

SEQ ID NO: 21105 - DNA, 510 bp, synthetic construct
  misc_feature 1..510: note = source = /note="Description of Artificial Sequence: Synthetic coding sequence"
  source 1..510: mol_type = other DNA
atggataccagaaacaaggctcagctgctcgtgttgttgacgctccttagcgtccttttttcccaaacctcagcatggcctttgtatagagcaccgtccgcactgagactcggggatcggatacctttcgaaggtgcaaacgagcccgatcaagtctcactgaaggaggacatcgatatgctgcagaatgcacttgccgaaaacgataccccctactacgatgtgtcgcgaaatgctcgccatgctgatggagtctttacgtcggacttttcgaagctgctgggacaactgtcagcgaaaaagtacctcgaatcgcttatgggtaagagagtgagctcgaacatctccgaggaccctgttcctgtcaaaaggcacagcgacgcggtgtttactgacaactacactaggcttcggaagcagatggccgtgaaaaagtatcttaactccattcttaatgggaaacgatcctcagaaggcgaatcgccagacttcccggaggaactggagaag

SEQ ID NO: 21106 - DNA, 510 bp, synthetic construct
  misc_feature 1..510: note = source = /note="Description of Artificial Sequence: Synthetic coding sequence"
  source 1..510: mol_type = other DNA
atggacacccgaaacaaggcccagctacttgttttgttaactctcctctccgtcttgtttagtcaaacaagtgcctggcccctttacagagccccatccgcactgagactaggagaccggattccatttgagggtgccaacgagcccgaccaagtctctctgaaggaagacattgacatgctgcaaaacgcgctggccgagaatgacacaccctactacgatgtgagtcgaaacgcacgtcacgcggacggcgtgtttacttccgacttttccaagttgctggggcagctttcggctaagaaatatctggagtccctgatgggaaaaagagtgagctcaaacatttctgaagatccagttcccgtaaagaggcacagcgatgcggtgtttacagacaactatacacgcttgaggaaacagatggcggtgaaaaagtacctgaattccatcctcaatggaaagcggtcaagcgaaggcgaaagccctgacttcccggaggagttggaaaaa

SEQ ID NO: 21107 - DNA, 273 bp, synthetic construct
  misc_feature 1..273: note = source = /note="Description of Artificial Sequence: Synthetic coding sequence"
  source 1..273: mol_type = other DNA
atgtcagctgcggataagcgggcacaccacaatgcccttgaacgcaagagaagggaccacatcaaggacagcttccattcgctccgcgactccgtcccgtccctccaaggagaaaaagcgagcagagcgcagatcttggacaaggcaactgagtacatccagtacatgcggcgaaagaaccacacccatcagcaggatattgacgatctgaagcgccaaaacgccctgctggagcaacaggtgcgcgctctggaaaaagcccggtcgtcagcc

SEQ ID NO: 21108 - DNA, 273 bp, synthetic construct
  misc_feature 1..273: note = source = /note="Description of Artificial Sequence: Synthetic coding sequence"
  source 1..273: mol_type = other DNA
atgtcagcggcagacaagagagcccaccataacgcgctcgaaagaaagagacgagatcacataaaggactcctttcatagccttagggattcggtcccttcgcttcaaggagagaaggcctcacgtgctcaaattctcgataaagcaactgagtacattcagtacatgaggcgcaagaaccatacccatcaacaggacatcgatgatctgaagcggcaaaatgcactgttggaacagcaggtgcgggcactggaaaaagcacgcagctccgcc

SEQ ID NO: 21109 - DNA, 273 bp, synthetic construct
  misc_feature 1..273: note = source = /note="Description of Artificial Sequence: Synthetic coding sequence"
  source 1..273: mol_type = other DNA
atgagcgcagccgacaagcgagcccaccacaacgcgctggaacgcaaacgcagagatcacatcaaggacagcttccactcgctgcgggactcggtgccgtcccttcaaggagaaaaggcgtcaagagctcaaatcctcgacaaggcaaccgagtacatccagtacatgaggcggaagaatcatactcatcagcaagacattgatgatctcaagcgccagaacgcgctgctggaacagcaggtccgcgctttggagaaagcccggtcctcagcc

SEQ ID NO: 21110 - DNA, 273 bp, synthetic construct
  misc_feature 1..273: note = source = /note="Description of Artificial Sequence: Synthetic coding sequence"
  source 1..273: mol_type = other DNA
atgagcgcagccgataagcgcgcacatcataatgcattggaaagaaagcggagagatcacattaaggactcctttcactcactccgcgattcggtgccttcgctgcaaggagagaaagcgtcccgtgcccaaatacttgacaaggcaaccgagtacatccaatacatgaggagaaagaaccatactcatcagcaagatattgatgacctcaaacggcagaacgcacttctggaacagcaggtccgagcgctggaaaaggccaggtcaagcgct

SEQ ID NO: 21111 - DNA, 1317 bp, synthetic construct
  misc_feature 1..1317: note = source = /note="Description of Artificial Sequence: Synthetic coding sequence"
  source 1..1317: mol_type = other DNA
atgccccttaacgtatccttcacaaatagaaactacgacttagactatgatagcgtccagccatatttctattgtgatgaggaagaaaacttctatcaacagcagcagcagagcgagttgcagcccccagctccaagcgaggatatttggaaaaagtttgaactgttgcctactcctcccctctccccttctaggaggagcggattgtgctcgccaagctacgtggctgttacacctttctccctcaggggagacaacgatggagggggaggaagtttcagcactgccgatcagttagagatggtgactgagctgctgggtggagacatggtgaaccagtcattcatttgcgaccctgacgacgaaacattcatcaaaaacatcatcattcaggattgtatgtggtctggattttccgccgcagccaaactggtaagcgaaaaactggctagttaccaggccgctaggaaagacagcgggtctcctaaccccgccagaggacactcagtttgctccacatcgtccctctacctacaggacctgagcgcagctgcgtccgagtgcattgatcctagtgtggtctttccatacccacttaacgacagttcatcccctaaaagctgcgcaagccaggactcctcagcattcagtccttcaagcgatagcctgctttcttccacggagagtagcccacaaggatctcctgagcccctggtccttcatgaggagacacctcctaccacatcttctgattcggaggaggaacaggaggatgaggaggaaatcgacgttgtgagcgtggagaagcgccaggccccaggaaaacgcagcgagagtggtagccctagcgcaggtggacattcaaaaccccctcacagtccactggttcttaaaaggtgtcatgtgtccacccatcaacataactatgccgctcctcccagcacccggaaagattacccagctgcaaaacgggtgaagctcgattccgtcagggtgttgcgtcaaatcagcaataacaggaagtgcactagtcctaggagcagcgacacagaagaaaacgtcaagaggcgcacacacaacgtactggagagacaaagacgtaatgaactcaagaggtccttttttgctttacgagaccagattcctgagctggaaaacaatgagaaagctcctaaagtggttattctcaagaaggccacagcttacatcttatccgtccaggcagaggagcagaaattgatctctgaggaagatctgcttaggaagcggagggaacaattaaaacacaagctcgagcaactgcggaatagctgcgct

SEQ ID NO: 21112 - DNA, 1317 bp, synthetic construct; identical to SEQ ID NO: 21111
  misc_feature 1..1317: note = source = /note="Description of Artificial Sequence: Synthetic coding sequence"
  source 1..1317: mol_type = other DNA

SEQ ID NO: 21113 - DNA, 1317 bp, synthetic construct
  misc_feature 1..1317: note = source = /note="Description of Artificial Sequence: Synthetic coding sequence"
  source 1..1317: mol_type = other DNA
atgcctctcaacgtgagtttcacaaataggaactacgatctcgattacgatagcgttcagccttatttctactgcgatgaggaggaaaatttctaccagcagcagcagcaatcagaactgcagccaccggctccgtctgaagatatctggaagaaattcgagctcctgcctacacctccactcagccctagcaggagaagtggtctatgttctccctcatacgtggctgttaccccttttagtttgcgcggcgacaacgacggaggaggtggatcattcagcaccgcagatcaacttgagatggtcactgagctgctcggcggcgatatggtgaatcagtcgtttatctgtgatcccgatgacgagacgttcatcaaaaatattattattcaggattgtatgtggagcggattctctgctgccgccaaactcgtgagcgagaaacttgcctcatatcaggccgcaaggaaggattccgggagccccaaccctgctcggggacatagtgtgtgctctacctcctcgctgtacttgcaagacctgtcagctgctgccagtgagtgtatcgacccatcagtggtgttcccataccctctgaacgactcctctagcccgaagagctgcgcctcccaagacagtagcgcattctccccaagcagtgacagccttctgagcagtacagagagcagccctcaggggtcaccagagccactcgttctccatgaggagactccccctaccacatctagcgactccgaagaagaacaggaagatgaagaagaaatcgacgtggtatcggtggagaagcgccaggcacccggtaaaaggtccgagagtggatcacccagcgctggaggacactctaagccaccacatagccccttggtcttgaaacgctgccacgtcagcacccatcagcacaattacgccgctcctccttcgacaagaaaggattaccctgctgctaaacgggtcaaactggatagcgtcagggtcctcaggcagatatccaacaacagaaaatgcaccagcccaaggagttctgatacagaagaaaacgttaagaggaggactcacaacgtcctggaacggcaacgccgaaatgaactgaagaggtcattttttgccttaagggaccagatccctgagctggagaataacgaaaaagccccaaaggtggtgattttgaagaaggctacagcctacatcctgagcgtccaagccgaggagcagaaactgatctccgaggaggatctgctcaggaaacgaagggagcagttgaaacacaaattggaacaattgagaaactcctgtgcc

SEQ ID NO: 21114 - DNA, 1317 bp, synthetic construct; identical to SEQ ID NO: 21113
  misc_feature 1..1317: note = source = /note="Description of Artificial Sequence: Synthetic coding sequence"
  source 1..1317: mol_type = other DNA

SEQ ID NO: 21115 - DNA, 1317 bp, synthetic construct
  misc_feature 1..1317: note = source = /note="Description of Artificial Sequence: Synthetic coding sequence"
  source 1..1317: mol_type = other DNA
atgccgctgaatgtgtcattcacgaaccgtaattatgacctggactacgactcggtgcaaccatacttctactgcgatgaagaggaaaacttctaccaacagcagcaacaatccgagctgcaaccgccggcaccgtcagaggatatctggaagaagttcgagctgctgccgaccccaccactcagcccatccagacggagcggcctgtgctctccgtcatacgtggccgtgacgccattctccctgcggggagacaacgatggagggggaggttcctttagtaccgcagaccagctcgaaatggtcactgagcttctcggaggagacatggtgaaccagtcctttatctgcgacccggatgacgaaaccttcatcaagaatatcatcattcaagactgtatgtggtctggtttctcagctgccgcgaagctcgtaagcgagaagctggcctcataccaggccgcccggaaggactcgggatctcccaatcctgcgagaggacattccgtctgctctacttcgtctctctaccttcaggatctctccgcggccgcatcggaatgcattgatccaagcgtggtgtttccgtaccctctgaatgactcgagctcgcctaaaagctgtgcgtcacaagactcgagtgcctttagcccttctagcgattcgctgctctcatccactgaaagctcgccccagggatcaccagagcctctggtgctgcacgaggagactccccccaccacttcgagcgactcagaggaagaacaggaagatgaggaagaaatcgacgttgtgtccgtcgagaagcgtcaggcgcccggaaagcgctccgaaagcggcagcccatccgcgggaggccacagcaagcctccgcactcaccgttggtgctgaagcgctgtcacgttagcacgcaccagcacaactacgccgcgccaccgtcgacccgaaaggattacccagccgcgaaacgcgtgaaattggacagcgtgcgggtgctgcgccagatctccaataaccgcaagtgcacttcaccacggtcatccgataccgaggaaaatgtgaagcgccggactcacaacgtcctggaaaggcagcgcagaaatgaactcaagcgcagcttcttcgcactccgcgatcagatcccagagctggagaataacgagaaagcgcctaaggtcgtcatcctgaaaaaagcaaccgcctacatcctgtccgtccaggccgaggaacaaaaactcatctcggaggaggacctcctccgcaagcggcgggagcagctgaaacataagctcgaacaactccgcaactcatgcgcg

SEQ ID NO: 21116 - DNA, 1317 bp, synthetic construct; identical to SEQ ID NO: 21115
  misc_feature 1..1317: note = source = /note="Description of Artificial Sequence: Synthetic coding sequence"
  source 1..1317: mol_type = other DNA

SEQ ID NO: 21117 - DNA, 1317 bp, synthetic construct
  misc_feature 1..1317: note = source = /note="Description of Artificial Sequence: Synthetic coding sequence"
  source 1..1317: mol_type = other DNA
atgccgcttaatgtttcgtttacgaaccgcaactatgaccttgactacgactctgtccagccgtacttctactgcgatgaggaagaaaacttctatcagcagcaacagcagtctgagctccagccacccgcccccagtgaggacatttggaaaaagtttgagctgcttccaacccctcccctaagtccctcgaggcgtagcggactgtgttctccgtcctatgtggctgtcactccattcagtctacggggcgataatgatgggggcggcggatctttctcgaccgccgaccagctggagatggtgaccgagttgctaggtggtgatatggtcaaccaatcattcatctgcgaccccgatgacgaaaccttcatcaagaacatcattatccaagactgtatgtggagcggtttctccgctgctgcaaagctcgtttccgaaaaattggcttcttaccaggctgcccgaaaggactccggctcccctaaccccgctcgtggtcattcggtgtgttctacttcctctttgtacctccaggacttgtctgccgcggcatctgagtgcatcgatcccagcgtggttttcccgtaccctctgaacgattctagcagccccaaatcctgcgcgtcgcaagactcatccgcgttctctccctcctcagacagcctgctctccagcaccgagtcgtcgccccaaggttcgcccgagcccctcgtattgcatgaagagacaccccccaccacctcctcagattccgaggaggagcaagaggacgaagaggaaattgacgtggtgagcgttgagaagcgccaggcgcctggtaagcggtctgagtcgggctcccctagcgctgggggtcattccaagcccccccactcgcccctcgtgttgaaacgctgccatgtttccacccaccagcacaactacgccgcgcctccttccaccagaaaagattacccggccgccaagcgtgtcaagctggactccgtgcgggtgctccgacagatttccaataaccgcaagtgcacttccccacgttcctctgacaccgaagaaaacgtgaagcgccgcactcacaacgtcctggagagacaacggcgtaatgagctgaagcggtcgttctttgctctgcgtgatcagattccggagcttgagaacaacgagaaggcccctaaagtcgtgatcctcaagaaggccaccgcttatattctttccgtccaggccgaggagcaaaagctgatttcagaggaagatctccttcgcaagcgccgcgagcagctaaagcacaagctggaacaactccgcaactcttgcgct

SEQ ID NO: 21118 - DNA, 1317 bp, synthetic construct; identical to SEQ ID NO: 21117
  misc_feature 1..1317: note = source = /note="Description of Artificial Sequence: Synthetic coding sequence"
  source 1..1317: mol_type = other DNA

SEQ ID NO: 21119 - DNA, 1317 bp, synthetic construct
  misc_feature 1..1317: note = source = /note="Description of Artificial Sequence: Synthetic coding sequence"
  source 1..1317: mol_type = other DNA
atgccactgaacgtctcctttactaatcgaaattatgacctggactatgattccgtccagccttatttttactgcgatgaggaagaaaacttttatcagcaacagcaacagtccgagcttcagcctcccgccccgtccgaagatatatggaagaaatttgagctgctgcccaccccaccgctctcacccagcagacgctcagggctctgcagccctagttacgtggccgtgaccccgtttagtctgcgcggcgataatgacggcgggggcggatccttctcgacagctgatcagctcgagatggttacagagctcctgggcggggacatggtgaaccagtctttcatctgtgacccagacgatgagaccttcattaaaaacatcattatccaggactgcatgtggagcggctttagcgccgctgccaagttagtcagcgagaagctggcctcctaccaggcagcacgcaaagatagtggctcccccaatcccgctagaggtcattccgtttgttctacctcctcactctatctgcaggacctaagcgcagcggcttctgagtgcattgaccccagtgtcgtgttcccttatccactgaatgactcctcttcccctaagtcatgtgcgtctcaagattcctccgctttctcaccatcttcagactctctcctctccagcaccgagagttcaccacaggggagtcccgaaccattagtgctgcacgaagaaacacctccaacgacctcctctgattctgaagaggagcaggaagatgaagaggagattgacgtagtgtctgtggaaaaacggcaggctcctggcaagaggtctgagagcggttcaccttctgcaggcggccactctaagcccccgcactcacctctcgtcttgaagcgatgccacgtgagcactcaccagcacaattatgctgccccgccttctacccggaaggactacccagccgccaaaagggttaagctggacagcgttcgggtgctgcgccagatttcaaataaccggaagtgtaccagtccccgatcttccgataccgaggaaaatgtgaagcgccgtacacataatgtcttagagcggcagcgccgcaacgagctaaagcgctccttctttgccctgcgcgaccagattcccgaactcgagaataacgagaaggcacctaaagtcgtcatcctgaaaaaggccacagcctatatattgagtgtccaggctgaggagcagaaacttatctcggaagaggatttactgagaaagaggcgggaacagctgaagcataagcttgagcagctgcgcaactcctgtgca

SEQ ID NO: 21120 - DNA, 1317 bp, synthetic construct; identical to SEQ ID NO: 21119
  misc_feature 1..1317: note = source = /note="Description of Artificial Sequence: Synthetic coding sequence"
  source 1..1317: mol_type = other DNA

SEQ ID NO: 21121 - DNA, 1317 bp, synthetic construct
  misc_feature 1..1317: note = source = /note="Description of Artificial Sequence: Synthetic coding sequence"
  source 1..1317: mol_type = other DNA
atgccacttaacgtgtcctttaccaatcggaattacgatctggattatgatagcgtgcagccctacttctattgtgacgaggaggaaaacttctatcagcaacagcaacagtccgaacttcaacctcctgctccatcagaagatatctggaaaaagtttgaactgttgcccaccccaccactttcaccatcacgtcggtcgggcctttgtagcccttcgtacgtggcggtgacccctttttcgctgagaggtgacaatgatggcggcggcgggtcgttttctaccgcagaccagcttgagatggtgaccgaacttctgggcggagatatggtcaatcagagcttcatttgcgatccagatgatgaaactttcatcaagaacatcataatacaagactgtatgtggtcagggttttccgccgccgcaaaactcgtgtccgaaaagctcgcaagctaccaggctgccaggaaggacagcggcagccctaatccggcccgagggcatagcgtctgttccacctcatccctctatcttcaggatctgtccgcggcagcgtccgaatgtattgacccttcggtggtgtttccctaccctttgaacgactcttcctcccctaagtcctgtgctagccaagacagctcggcgttctctccttcctcagattcgctgctcagcagcactgaaagctccccccaaggttccccagaaccactggtactccatgaagagactcctcctactactagctcggactcggaggaagaacaggaagatgaagaagaaattgatgtcgtgtcggtggagaaacggcaagcaccaggaaaaagatcggaatccggatcaccatcggctggaggtcactcgaagccgccacactccccacttgtcctgaagcggtgccatgtgagcacccatcagcacaactacgcagcaccccccagcactcgcaaggattacccagccgccaagcgggtgaagctggacagcgtccgagttcttcgccaaatctctaacaacagaaagtgtactagccccaggagctcagataccgaagagaacgtcaaacgaagaacccacaatgtcctggagagacagagaagaaatgagttgaaacgcagcttttttgcacttcgcgatcaaatacccgagcttgaaaacaacgaaaaggcacctaaagtggtcatattgaagaaagcgactgcgtacatcctctcggtccaagcagaggagcaaaagctcatcagcgaggaggaccttctcaggaagagacgggaacagcttaaacataaactcgaacaactcaggaacagttgtgca

SEQ ID NO: 21122 - DNA, 1317 bp, synthetic construct; identical to SEQ ID NO: 21121
  misc_feature 1..1317: note = source = /note="Description of Artificial Sequence: Synthetic coding sequence"
  source 1..1317: mol_type = other DNA

SEQ ID NO: 21123 - DNA, 1317 bp, synthetic construct
  misc_feature 1..1317: note = source = /note="Description of Artificial Sequence: Synthetic coding sequence"
  source 1..1317: mol_type = other DNA
atgcctctgaacgtgtcgttcaccaataggaattatgaccttgactacgacagtgtccagccatatttttactgcgatgaggaggaaaacttctatcagcagcagcagcagtcagaacttcaaccaccagctccaagcgaggacatttggaagaagtttgagttgctgcctacacctcctctcagtccatcaaggcggtcggggctgtgtagcccttcatacgtggcagtaacacccttcagcctcaggggggataatgatggaggaggtggttctttttctacggcggatcaactggaaatggtcaccgagctacttggcggagatatggtgaatcagtcattcatatgcgacccagatgacgagacttttattaaaaacatcatcattcaggattgcatgtggagtggtttctctgcagcggccaagctggtgtcagagaagctggctagctaccaagccgcgaggaaagacagcggttcacctaacccggcacgaggccactcagtgtgcagcacttcttcgctgtacctccaggacctttccgcagcggcgagcgagtgtatcgacccttccgtggtcttcccttaccctcttaacgactctagtagccctaaatcctgcgcctcgcaggactcttctgccttcagtccgtcttctgactccctcttgtcttctacggaaagctcaccccaagggtcccccgagcccctagtgctacacgaggagactcccccgaccaccagttctgatagcgaggaagagcaagaggacgaagaggagatcgacgtggttagcgttgagaagaggcaggctcctgggaagcgatcggaaagcgggtctcctagcgccggcggacattcaaagccaccccatagcccgctggtacttaagaggtgtcacgtttccactcatcagcataactacgcagctccacctagcacccgcaaggattatcctgctgctaaaagggtgaagctggattctgtacgggtgttgcggcagatatccaacaacagaaagtgtacaagccctagaagcagcgacaccgaagagaatgtgaagaggcgcacacacaacgtacttgaacggcagcggaggaatgaacttaaacgctcctttttcgctctgagagaccaaatccccgagctggaaaacaatgaaaaggctcctaaagttgtaattctaaaaaaggcaacagcttatatcctttctgtccaggcggaggagcagaagctgatttctgaggaggatctgttgcgcaagaggagagaacaactgaaacataaactggagcagctgcgtaattcttgtgct

SEQ ID NO: 21124 - DNA, 1317 bp, synthetic construct; identical to SEQ ID NO: 21123
  misc_feature 1..1317: note = source = /note="Description of Artificial Sequence: Synthetic coding sequence"
  source 1..1317: mol_type = other DNA

SEQ ID NO: 21125 - DNA, 1317 bp, synthetic construct
  misc_feature 1..1317: note = source = /note="Description of Artificial Sequence: Synthetic coding sequence"
  source 1..1317: mol_type = other DNA
atgccacttaacgtgtcctttaccaatagaaactacgatcttgactacgactcagtgcagccatacttctactgtgacgaggaagaaaacttctaccaacagcaacagcagtcggaactccaacctcctgcgccatccgaagatatctggaagaaattcgagctcctcccaactcctcccctttcgcctagcaggagatcgggactgtgtagcccctcatatgtggcagtcactccattttcgcttagaggggacaacgacggaggaggcggatctttctccaccgccgaccagcttgagatggtgactgaactgttgggtggggatatggtcaaccagagcttcatctgcgaccccgatgacgaaacctttatcaagaacattatcattcaagattgtatgtggtcaggttttagcgccgcagcaaagctggtgtcagagaaacttgcaagctaccaggcagcgagaaaggacagcggatcgccaaatccagctaggggtcattccgtgtgttcaacttcgagcctctaccttcaagacctttcagcagcggcatccgaatgcatcgacccttctgtggttttcccttaccccctgaacgattcctctagccctaaatcctgcgcaagccaagactcctccgctttttcgccttcgtcagactcgctgctgagctcaaccgaatcctccccccagggatctcccgagcctcttgtgctgcatgaagaaaccccacctaccactagttccgactcagaggaggagcaggaggacgaggaagagattgacgtagtgtccgtggaaaagaggcaagctcccgggaaaaggagcgagtcgggatcgccatcagcgggtggccacagtaaacctccacactcgcctctggtcttgaaaagatgtcatgtgtcgacccatcagcacaattacgcggcacctccttccacccgcaaggactacccagcagccaaacgtgttaagctggattccgttcgggtgctccgccaaatatcgaacaaccggaagtgtacttcaccaagatcctcggataccgaagaaaacgtcaagagacgcacccacaacgtcctggagaggcagcggcgaaatgaactgaagcgctccttctttgcacttcgagatcaaattcctgaactggagaacaacgaaaaggcgcctaaggtggtcatactcaagaaggccactgcatacatcctcagcgtgcaggctgaagaacagaagctcattagcgaggaggatttgttgaggaaacgacgcgaacaacttaagcataagctggaacagctgagaaacagctgtgcg

SEQ ID NO: 21126 - DNA, 1317 bp, synthetic construct; identical to SEQ ID NO: 21125
  misc_feature 1..1317: note = source = /note="Description of Artificial Sequence: Synthetic coding sequence"
  source 1..1317: mol_type = other DNA

SEQ ID NO: 21127 - DNA, 1317 bp, synthetic construct
  misc_feature 1..1317: note = source = /note="Description of Artificial Sequence: Synthetic coding sequence"
  source 1..1317: mol_type = other DNA
atgccactgaacgtctcctttactaacagaaactatgatctggactacgacagcgtgcagccatatttctattgtgacgaggaggagaacttttatcaacaacagcaacaaagcgaactgcagccccccgcccctagtgaggacatatggaaaaagtttgagctgctccctacaccacctctgtctcctagcaggagaagcggcttatgtagcccatcttacgtggctgttaccccatttagcctcagaggtgacaatgacggcggcggcggctctttctctaccgcagatcagctggagatggtcacagaactgctcggtggcgacatggtcaaccagagctttatttgtgacccagatgatgaaaccttcatcaagaacattattatccaggactgtatgtggagcgggtttagtgcagccgccaagctcgtgagcgagaagctcgcttcctaccaggccgccaggaaagatagcggcagccccaacccagcccggggacattcagtgtgtagcaccagttctctatatttacaggacctcagcgcagctgcctccgagtgcatagacccatctgtcgtttttccctacccattgaatgacagctcaagccctaagagttgcgcttctcaggattcaagcgctttcagtccctcttcagactccttgctgtcatccacagaatctagtcctcaggggagccctgaaccactggtgctccacgaggagacccctccaactaccagttccgactctgaagaagagcaggaagacgaagaagagatagatgtggttagcgtggaaaaacggcaagccccaggcaagcgtagcgaatcaggttcccccagtgctggaggtcatagcaagcccccacattcacccctggtgctaaaacgatgccatgttagcactcaccaacataattatgccgcccctcccagtacccgaaaggattatcctgcagctaagagagtcaaattagatagcgtccgggtgctcagacagatatctaacaatcggaagtgtacaagcccccggagttctgataccgaggagaacgtgaagagacgtacacataatgttctagagcgtcagcggaggaacgaactcaaaagatcatttttcgctctgcgggaccaaatccctgagcttgaaaacaatgagaaagcacccaaggtggtcattcttaagaaagccaccgcctatattctgtccgttcaggccgaggaacaaaaactgatcagtgaagaagacctattgcgcaaaagacgcgaacagctgaaacacaagctggagcagctgcgaaactcatgtgca

SEQ ID NO: 21128 - DNA, 1317 bp, synthetic construct; identical to SEQ ID NO: 21127
  misc_feature 1..1317: note = source = /note="Description of Artificial Sequence: Synthetic coding sequence"
  source 1..1317: mol_type = other DNA

SEQ ID NO: 21129 - DNA, 1317 bp, synthetic construct
  misc_feature 1..1317: note = source = /note="Description of Artificial Sequence: Synthetic coding sequence"
  source 1..1317: mol_type = other DNA
atgcctctcaacgtgtcgtttactaatcgtaactacgatctcgattacgattcggtgcagccatacttttactgtgatgaggaagagaacttttaccagcaacagcaacaaagcgaactgcagcccccagcgccatcagaagatatatggaaaaagtttgaactgcttcctacgcccccactgtccccatccagacgctccggtctttgttccccttcgtacgtggcagtgaccccattctcgctgcggggcgacaatgatggaggcggaggttccttctcgaccgccgatcagcttgagatggtgactgaacttctggggggagatatggtgaatcaatctttcatatgtgatccagatgatgaaacttttatcaagaacatcattatccaagattgtatgtggtcaggattttcggcggcagccaagctcgtgtcggagaagctggcctcataccaagcggcccggaaggattcgggatcgcccaaccctgcgcgtggtcatagcgtgtgctcaacctcatctctgtacctccaggatcttagcgccgcagcatccgaatgtattgacccttcagtcgtgtttccctaccccctgaatgattcctcctcaccaaaatcgtgtgcctcccaggattccagcgcattttcgccgtcctcagatagcctgctgtcatcgacggaatcgtcacctcagggctcccctgagccactcgtccttcacgaagaaacccctccaactacttcgtcggattcggaagaggagcaagaggacgaggaggaaatcgatgtcgtgagcgtggaaaagaggcaggcaccaggaaagcgttcggaatctggatcgccgtccgcagggggccactccaagccgccacactcaccactcgtgttgaagagatgtcatgtgtcgacccatcagcacaactacgctgcacccccctcgaccagaaaggattacccggcagcaaagagagtcaaacttgacagcgtccgcgtgcttcgccaaatatccaataacagaaagtgtacctcacctcggtcctcagacaccgaagagaatgtcaagagaagaactcacaacgtgcttgagagacagcggagaaacgaacttaaacggtccttttttgctctgcgcgaccagataccggaacttgaaaacaatgagaaggcgcctaaagtcgtgatacttaagaaggcgactgcatacattctgtccgtccaggcagaagagcaaaagctgatttccgaggaagatctcctgagaaagcgaagggaacaactgaagcataaacttgaacaactcagaaacagctgtgca

SEQ ID NO: 21130 - DNA, 1317 bp, synthetic construct; identical to SEQ ID NO: 21129
  misc_feature 1..1317: note = source = /note="Description of Artificial Sequence: Synthetic coding sequence"
  source 1..1317: mol_type = other DNA

SEQ ID NO: 21131 - DNA, 1317 bp, synthetic construct
  misc_feature 1..1317: note = source = /note="Description of Artificial Sequence: Synthetic coding sequence"
  source 1..1317: mol_type = other DNA
atgcctcttaatgtctcattcaccaaccgtaactacgaccttgattacgatagcgtgcagccttacttttactgcgatgaggaagaaaacttttaccagcaacaacagcaatcggaactgcagccaccagcaccttcagaggacatctggaagaagtttgaacttctgccaactcctcctctcagcccctcaagaagatcaggattgtgttcgccttcgtacgtggcggtcaccccattttcccttcgaggagataatgacggtggcggaggatccttttcaaccgcggaccaacttgaaatggtcactgagctgttgggtggagatatggtgaaccaatccttcatttgcgaccccgacgatgagacgttcatcaaaaacattatcatccaagattgtatgtggtcaggattttctgcagccgctaaacttgtgagcgagaaactcgcaagctaccaagcagcccgcaaagattcgggaagccccaatccagcaagaggtcattcggtgtgttcaacttcatccttgtacctgcaggatctttcggccgcagcgagcgagtgtatcgacccatcggtggtgtttccttaccctctcaatgactcctcgtcgcctaaatcatgcgcatcgcaagactccagcgcctttagcccatcctcagattcgctcctttcgtccaccgagagctcaccacaggggtcgccagagccccttgtgctgcatgaagaaactccgcctacgaccagcagcgattcagaagaagaacaagaggacgaagaagaaattgacgtggtatcggtggaaaagcgccaagcaccaggcaagcgatcagagagcgggtcgccgtcggcaggcggtcactccaagcctcctcattcgccgctcgtcctgaagagatgtcacgtgagcactcaccaacacaattacgcggcacctccttcaacccgaaaggactaccccgccgccaaaagagtgaaattggactccgtgcgcgtcctcagacagatttcaaacaacaggaagtgtacctccccaagatcaagcgatactgaagaaaacgttaaaagaagaacccataacgtgctggaacggcaacggcggaatgagctgaagaggtcgtttttcgcacttcgggatcaaattccagagcttgagaacaacgaaaaggccccgaaggtggtgattcttaagaaagcaactgcatatatcctgtcagtgcaggccgaagaacaaaagctgataagcgaagaagatctgcttagaaagcgccgagaacagcttaaacacaaacttgagcagttgaggaactcgtgtgcc

SEQ ID NO: 21132 - DNA, 1317 bp, synthetic construct; identical to SEQ ID NO: 21131
  misc_feature 1..1317: note = source = /note="Description of Artificial Sequence: Synthetic coding sequence"
  source 1..1317: mol_type = other DNA

SEQ ID NO: 21133 - DNA, 1317 bp, synthetic construct
  misc_feature 1..1317: note = source = /note="Description of Artificial Sequence: Synthetic coding sequence"
  source 1..1317: mol_type = other DNA
atgcctcttaatgtatcctttacgaaccgtaactacgatctggactacgattcggtgcagccttacttttactgtgatgaagaagagaatttctaccagcaacaacaacagtcggagcttcaaccacccgccccctcggaggacatttggaagaagttcgaactgcttcctaccccacctctctcgccatcccgccgatctgggctctgttcaccaagctacgtggcggtgactccattcagccttagaggagacaacgacggagggggcgggagcttttccaccgccgatcaacttgaaatggtgactgagcttctggggggagatatggtcaatcaatccttcatctgtgatcctgatgatgaaactttcatcaagaatatcatcattcaagattgtatgtggtcaggcttttctgcggcagcaaagctcgtgagcgaaaagctggcgtcgtaccaggcggcgaggaaggactcgggatcgccaaacccagccagagggcattccgtgtgctcaactagctcactgtaccttcaggatctgtccgcggcagcaagcgagtgcatcgaccctagcgtggtctttccttacccattgaatgattcctcaagcccaaaatcgtgcgccagccaggattcctctgccttttcaccaagctctgattcccttttgagctctaccgagtctagcccgcaggggtcacctgaaccacttgtcttgcatgaagaaactcctcctactacctcctccgatagcgaggaagaacaggaggacgaggaagaaatagacgtggtttcagtggaaaagaggcaagcacctgggaagcgaagcgaatcaggctcaccgtcggcgggtggtcattccaagccaccacactcgccactggtcttgaaaaggtgtcatgtgtccacgcaccagcacaactatgcagcccctccctcgacgcggaaggactaccctgccgcaaagcgggtcaaactcgactccgttcgcgtgcttaggcaaatttcaaacaatcgcaagtgtacttcgccgcgatcctccgacactgaggaaaatgtcaagcgcaggacccacaacgtgcttgaaagacagagacggaacgagctgaaaagatcgttttttgcgctgagagatcaaattcccgagctcgaaaacaacgagaaggcacccaaagtggtgattctcaagaaagcaaccgcatacattctctcagttcaagcagaggaacaaaagctcatatcggaagaagatctcctccgtaaacgtcgggagcaactgaaacataagctcgaacagcttagaaactcgtgtgcg

SEQ ID NO: 21134 - DNA, 1317 bp, synthetic construct; identical to SEQ ID NO: 21133
  misc_feature 1..1317: note = source = /note="Description of Artificial Sequence: Synthetic coding sequence"
  source 1..1317: mol_type = other DNA

SEQ ID NO: 21135 - DNA, 1317 bp, synthetic construct
  misc_feature 1..1317: note = source = /note="Description of Artificial Sequence: Synthetic coding sequence"
  source 1..1317: mol_type = other DNA
atgcctctgaatgtgagcttcaccaaccgcaattatgatttggattatgactccgtgcaaccatacttctattgcgatgaagaagagaatttctaccagcagcagcagcagtcagaattgcagcctccagctcccagcgaggacatatggaaaaagttcgagctcctgccgaccccccctctgagtcccagcagacggagtgggctttgcagcccctcctatgtagccgttaccccctttagtctgcgaggagataatgacggcggggggggcagtttttctactgcagaccaactagaaatggtgacggagcttctgggaggcgacatggtcaatcagagcttcatatgtgaccccgatgatgagacatttatcaagaacatcatcatccaagactgtatgtggtcaggcttcagtgctgccgccaagctcgtctccgagaaacttgctagctatcaggctgctcgaaaagattccggcagccctaatcctgcccgtggccattccgtttgtagcacatccagcctctacctgcaggatctctctgctgcagcctctgagtgcatcgacccatcggtcgtgttcccctaccccctaaatgacagcagctcacccaagtcctgtgcgtctcaggactctagcgcctttagtccttcttccgacagcctgctctcctcgaccgaatcatctcctcaggggtcaccagaacccctggtgctgcacgaggagacacccccaacaactagcagtgactctgaggaggagcaggaagatgaagaggagatcgacgttgtgtcagtggagaagagacaagctcctggaaagaggagtgagtcagggagcccttcagcgggggggcactccaaacctccacacagccctctggttctcaaacgctgccacgtgtctacgcatcagcataattatgctgcccccccttccacacggaaagactatcctgctgctaagcgagtgaagctagattccgtgcgggtcctccggcaaatttccaataataggaaatgcactagccccaggagtagcgataccgaagagaacgtgaagcgcagaacccacaatgtcttggagcggcaacgccgaaatgaactcaaacggtccttctttgctctgagggaccagattccagagctcgaaaacaatgaaaaagccccaaaagtcgtaatcctgaaaaaggctacagcttatatcctgtcggtgcaggccgaggagcagaagttgatatccgaggaagacctgctgaggaaaaggagggaacaactgaagcacaaattggaacagctgcggaatagttgtgct

SEQ ID NO: 21136 - DNA, 1317 bp, synthetic construct; identical to SEQ ID NO: 21135
  misc_feature 1..1317: note = source = /note="Description of Artificial Sequence: Synthetic coding sequence"
  source 1..1317: mol_type = other DNA

SEQ ID NO: 21137 - DNA, 1317 bp, synthetic construct
  misc_feature 1..1317: note = source = /note="Description of Artificial Sequence: Synthetic coding sequence"
  source 1..1317: mol_type = other DNA
atgccactgaatgtgagttttacaaatagaaattacgatttagattatgactctgtgcaaccatatttctactgcgacgaggaagaaaatttctaccaacagcagcagcagtccgagctccaacctcctgcaccctccgaagatatctggaagaagtttgagctgctgcccaccccgcctctgtccccttcccgccgctctggcctgtgctcccctagttacgtcgccgttacacccttttctctgcgcggggataatgacgggggggggggctccttctccacagccgatcaactggagatggtcaccgaattgctcggaggggacatggtgaaccagagttttatatgcgatccagatgacgagacgtttatcaaaaacatcataatccaggactgtatgtggtctgggttctccgcggccgcaaaactggtctccgaaaagttagcttcataccaggcggcgagaaaggatagtgggtctcctaaccccgctaggggccactccgtatgcagcacatcctcgctctatttgcaggacctttccgccgctgcttccgaatgtattgatccatctgttgtgttcccttacccacttaatgactcttccagtcctaaatcgtgcgcaagtcaggatagctccgctttttctcccagctccgattcactgttatctagcaccgaatcctccccacagggttccccagagccgctggtcttgcatgaggaaaccccacccaccaccagcagcgatagtgaggaggaacaagaggacgaggaggagattgacgtagtgtcggtagagaaacgccaggcacccggcaagcgctccgagtcaggaagccctagtgctggcgggcattcaaagcccccgcacagcccgttggtgctgaagaggtgtcacgtgtccacacaccagcacaactacgccgcaccccccagcacacgtaaagactacccagctgctaaaagggtcaagctggactccgtccgagtgcttaggcaaatttcgaacaatagaaagtgtacaagcccacggagttctgacaccgaagagaacgtcaagagacgtacccacaacgtgctggagagacagaggcggaacgaactgaagcgttcattcttcgcgctgagggaccagatacctgaattggagaacaacgagaaggctcctaaggtggtgatactcaagaaggccaccgcctacatcctctcggtgcaggctgaagagcagaagcttatcagtgaagaagaccttctgcggaagcgtcgcgaacagttgaaacataagcttgaacagcttagaaattcatgtgcc

SEQ ID NO: 21138 - DNA, 1317 bp, synthetic construct; identical to SEQ ID NO: 21137
  misc_feature 1..1317: note = source = /note="Description of Artificial Sequence: Synthetic coding sequence"
  source 1..1317: mol_type = other DNA

SEQ ID NO: 21139 - DNA, 1317 bp, synthetic construct
  misc_feature 1..1317: note = source = /note="Description of Artificial Sequence: Synthetic coding sequence"
  source 1..1317: mol_type = other DNA
atgcccttgaatgttagctttactaatcgcaattacgacctggactacgactccgttcaaccctacttttactgtgacgaggaggaaaacttttaccaacaacagcagcaatcggaactccaacccccagcaccttcagaagatatttggaagaagtttgaacttctgccgactccgccgctgtccccttcgagacgttccgggctttgctcgccttcttacgtggcagtcacccccttttcacttcggggcgataacgatggaggcggtggatccttttcgaccgcggatcagttggaaatggtgaccgaacttctcgggggtgatatggtgaaccagtcattcatatgtgatccagacgatgaaaccttcatcaagaacatcatcatccaggactgtatgtggagcggattcagcgcagccgcgaaacttgtcagcgaaaagttggcaagctatcaagcagcgagaaaggattcggggagccctaacccagctcgcggacatagcgtctgttcaacctcgagcctctaccttcaagatctgagcgctgcggcatccgagtgtatcgatccatcagtggttttcccttaccctcttaatgattcctcgagccccaagtcgtgcgcaagccaagatagctcggcattctcaccttcaagcgactccctgctgtcctcgaccgagtcatcgcctcagggctcccctgaaccgttggtcctgcatgaggaaactcctcccactacctcatcggacagcgaggaagaacaagaggatgaagaagaaattgatgtggtgtcagtggaaaagagacaggcacccggcaaacgcagcgagtccggttctccatcagcaggtggacattcaaagcccccacactcgccattggtgcttaaaagatgtcacgtctcaacccatcaacataactacgcagcaccaccttcgacgaggaaggactacccagcagccaagagagtgaaactcgattcggttcgcgtgctcagacagatttcgaacaatcgcaaatgcactagccctaggtcatcggacactgaggaaaacgtgaaacgaagaacgcacaacgtgctggagcgacaacggcgtaacgagctgaagcggtcgttttttgcactccgagatcaaatacctgaattggaaaacaatgagaaggcgccaaaagtggtcatactcaaaaaggcaaccgcatatatcctgtcagtgcaggcagaagaacagaagctcatttctgaagaagatctgcttcgcaagcgaagggagcaacttaaacacaagctggagcagcttagaaattcgtgcgca

SEQ ID NO: 21140 - DNA, 1317 bp, synthetic construct; identical to SEQ ID NO: 21139
  misc_feature 1..1317: note = source = /note="Description of Artificial Sequence: Synthetic coding sequence"
  source 1..1317: mol_type = other DNA

SEQ ID NO: 21141 - DNA, 1317 bp, synthetic construct
  misc_feature 1..1317: note = source = /note="Description of Artificial Sequence: Synthetic coding sequence"
  source 1..1317: mol_type = other DNA
atgccgctgaacgtgtcattcactaaccggaattacgatctcgactacgactctgtgcaaccgtacttctactgtgacgaagaagagaatttctaccagcaacagcagcagtccgaacttcagccgcctgcaccctcagaggatatctggaagaagttcgagctgctcccaactccgccgctgagcccgtcgcggcggtcgggcctctgctcgccttcatacgtggccgtcaccccgttcagcctgagaggcgacaacgacggaggaggcggatccttctccactgccgaccaactggagatggtaactgaactgcttgggggagacatggtgaaccaatcgttcatctgcgacccagacgacgagacttttatcaagaacatcataatccaagactgtatgtggagcgggttttccgctgcggccaagctggtgtcggagaaactggcgtcctatcaggctgcccgaaaggactccggatcaccgaacccagcgcggggacactcagtgtgctcgacttcctcgctctacctgcaggatctctcggcggccgcaagcgagtgtattgatccttccgtggtgttcccgtaccccttgaacgatagctcgtcgccgaaatcatgcgcttcccaagattcaagcgccttctcaccgtcgtcagattccttgttgagcagcaccgagagttcgccgcagggatcaccagaaccactggtgctgcacgaggaaactccgccaactacctcgtccgattccgaggaggagcaggaagatgaggaagagatcgacgtggtcagcgtggagaagcgtcaggcaccagggaagcgctcagaatcgggttcaccatccgcgggcggccactctaaaccgcctcactctccccttgtcctcaagaggtgccatgtctccacgcaccagcacaactacgccgccccgccaagcactcgcaaagactacccggccgccaaaagagtgaagctggattcggtgagagtcctccgtcagatttccaataaccgcaagtgcactagcccacgctcctccgataccgaggaaaatgtgaagcgcagaacccacaacgtgctcgagcgacaacgccgaaacgaacttaaacgctccttcttcgccctgagggaccaaattccagaactcgaaaacaacgaaaaagcgcctaaggtggtgatcctgaagaaggctaccgcttacatcctctcggtgcaggctgaggaacagaaactcattagcgaagaggacctgctgaggaaaagacgtgagcagttgaagcataagctggaacagctgaggaattcatgcgcg

SEQ ID NO: 21142 - DNA, 1317 bp, synthetic construct; identical to SEQ ID NO: 21141
  misc_feature 1..1317: note = source = /note="Description of Artificial Sequence: Synthetic coding sequence"
  source 1..1317: mol_type = other DNA

SEQ ID NO: 21143 - DNA, 1317 bp, synthetic construct
  misc_feature 1..1317: note = source = /note="Description of Artificial Sequence: Synthetic coding sequence"
  source 1..1317: mol_type = other DNA
atgcccttaaacgtgtcttttactaaccgtaattacgaccttgactacgattccgtacagccttacttttactgcgacgaagaagagaatttctaccagcagcagcagcagtccgaactgcagccgcctgctccatcagaggatatttggaaaaagttcgagttgttgccaaccccccccctctcgcccagcagaaggtctggcctatgcagtccatcctatgtggccgtgactcccttcagcttgaggggcgataacgatggcggagggggaagcttttctaccgctgaccagctcgagatggtgaccgagctgctgggcggagatatggtgaaccagagcttcatctgcgatcccgacgacgagacgttcatcaaaaacataattatacaggactgcatgtggtcaggattttctgccgcggcgaaacttgtctccgaaaaacttgccagctatcaggctgcacggaaggattccggaagtcccaatccagctcgggggcatagtgtgtgcagcacgagctctctctacctgcaagatctgagtgccgccgcctccgagtgcatcgacccttctgtagtattcccctacccactgaatgattctagtagccctaagtcttgtgctagtcaagatagttccgccttctctcctagcagcgactccttactcagtagtacggaaagctcaccacagggctccccagaaccgctcgtcctgcatgaagagacccctccgacaacaagctcagacagtgaggaggagcaggaggatgaggaagaaatcgacgtcgtctctgtcgagaagcgccaggcgcccgggaaacgaagcgaatctggatctccatccgccggtgggcacagcaagcctccccactcacctttggtcctgaagaggtgtcatgtctccactcaccagcacaactatgccgcgcctccatctaccagaaaagattacccagcagccaagcgagtcaagctggactccgtcagagtgctgcgacaaatttccaataaccgaaagtgtactagcccccgctccagcgacacagaggagaatgtaaaaaggagaacgcacaacgtgttggaaagacaaagacgaaatgagttgaagcgatctttcttcgcacttagagatcagattccggagttggaaaataacgaaaaagctcccaaagtggtaatcttaaaaaaggcaaccgcatacattctaagtgtgcaggccgaagagcagaagcttattagcgaggaagacttgcttaggaaacgacgagagcagctgaagcacaaacttgaacaactcaggaactcgtgtgca

SEQ ID NO: 21144 - DNA, 1317 bp, synthetic construct; identical to SEQ ID NO: 21143
  misc_feature 1..1317: note = source = /note="Description of Artificial Sequence: Synthetic coding sequence"
  source 1..1317: mol_type = other DNA

SEQ ID NO: 21145 - DNA, 1317 bp, synthetic construct
  misc_feature 1..1317: note = source = /note="Description of Artificial Sequence: Synthetic coding sequence"
  source 1..1317: mol_type = other DNA
atgccactgaacgtgtcattcactaaccgcaactacgacttggattacgattccgtgcagccgtacttctactgtgacgaggaggaaaacttttaccaacagcaacagcaatcagagttgcagcctccggccccatcggaggatatctggaaaaagtttgagctgctgccgactccgccccttagcccttcacgccgctcagggctctgctccccgtcatacgtggcggtgaccccgttcagcctccgcggggacaacgacgggggtggaggctcgttcagcactgctgaccaacttgaaatggtcaccgaactgctcggaggagatatggtgaatcagtcgtttatctgtgatccggacgatgaaaccttcatcaagaacatcatcatccaagattgcatgtggagcggcttctcggccgcagcaaaacttgtgtcggaaaagctggctagctaccaggcggcacggaaagactctggaagcccaaacccagctcggggacactcagtgtgttccactagtagcctgtacttgcaggacctctcggccgccgccagcgaatgtatagatcctagcgtggtctttccgtaccccctgaacgactcttcgagtcctaagagctgcgccagccaagactcgtccgcgttttcgccgtcgtccgacagcctgctctcttcgaccgaaagcagcccacaggggtcccctgagccactcgtcctccacgaagaaaccccgcccactacttcctccgattcggaagaggagcaggaggacgaagaggagatcgatgttgtctcggtggaaaagaggcaggcccctggcaagcggtcggagtccggatcgcctagcgcgggcggacacagcaagcccccacatagcccactggtcctcaaaagatgccatgtgtccacccaccaacacaattacgctgcacctccgtcgacccgcaaagactaccctgccgcaaagcgcgtcaagctcgattcggtgcgcgtccttcgccagatctcaaataaccggaaatgtacttcacctagaagctcggacactgaagaaaacgtcaagcgtagaactcataacgttctggagagacagcgccgcaacgaactgaagcggtcattctttgccctgcgtgaccaaatcccggaactggagaataatgagaaggctcctaaagtggtgattctcaaaaaggcgactgcatatatcctgtcagtgcaagcggaagaacagaaacttattagcgaagaggacttgctgcggaaacgcagagagcagctcaagcacaaactcgagcagctccggaacagctgtgcg

SEQ ID NO: 21146 - DNA, 1317 bp, synthetic construct; identical to SEQ ID NO: 21145
  misc_feature 1..1317: note = source = /note="Description of Artificial Sequence: Synthetic coding sequence"
  source 1..1317: mol_type = other DNA

SEQ ID NO: 21147 - DNA, 1317 bp, synthetic construct
  misc_feature 1..1317: note = source = /note="Description of Artificial Sequence: Synthetic coding sequence"
  source 1..1317: mol_type = other DNA
atgccactcaacgtgtccttcaccaaccggaactacgacctggactacgactcggttcagccctatttctattgcgatgaggaagagaacttttaccagcaacagcagcagtcggagctccaacctccagccccttcagaggacatctggaagaagtttgagttgctcccgactccgccgttgtcgccctcgcgcaggagcggactgtgttcgccatcatacgtcgcggtcaccccgttttccctccgcggagataacgatggaggcgggggatccttctccaccgccgaccagctggagatggtgaccgagctcttgggcggagacatggtgaatcaatcgttcatctgcgacccggacgacgaaaccttcatcaagaatatcatcatccaggactgcatgtggtccggattctccgccgcagccaaactcgtctccgaaaaactggcgtcgtaccaggccgcgcggaaagatagcggttccccgaaccccgcgcgaggccactccgtgtgctcgacctcgtcactgtacctccaagacttgagcgcggccgccagcgagtgtatcgacccctcggtcgtctttccatacccactgaatgactcgtcatccccgaagtcatgcgcttcacaagattcaagcgcattctcaccctcgtcagactccttgctcagcagcactgaatcatcgccacaaggatcgccggaaccgctggtgctgcatgaagaaactcctccgacgacttccagcgatagcgaagaggaacaagaagatgaagaggaaatcgacgtggtgtcagtcgagaaacgccaggcaccgggcaagaggagcgagtcaggatcgccctccgctggagggcattcgaagcctccgcactccccgctggtcctgaaacgctgccacgtgtcgactcatcagcacaactacgccgcaccccctagcaccagaaaggactaccctgccgccaagcgggtgaagctggatagcgttagagtgctgcgccagatctcgaataaccgcaagtgcacctccccgcgctctagcgatactgaagaaaatgtgaagcgaagaacgcataacgtgctggaacgccagcgcagaaacgaactgaagcgttcctttttcgccctgcgtgaccagattcccgagctggagaataatgagaaagctcccaaggttgtcatcttgaagaaggcgaccgcctacatcctgtcggtgcaagccgaggaacaaaaacttataagcgaggaagatcttctgagaaagagacgcgaacaactgaagcacaagctggaacaactgcggaactcctgtgcc

SEQ ID NO: 21148 - DNA, 1317 bp, synthetic construct; identical to SEQ ID NO: 21147
  misc_feature 1..1317: note = source = /note="Description of Artificial Sequence: Synthetic coding sequence"
  source 1..1317: mol_type = other DNA

SEQ ID NO: 21149 - DNA, 1317 bp, synthetic construct
  misc_feature 1..1317: note = source = /note="Description of Artificial Sequence: Synthetic coding sequence"
  source 1..1317: mol_type = other DNA
atgcctctcaacgtgagtttcacgaaccgcaactacgacctggactatgactccgtccaaccgtacttttattgcgacgaggaggaaaacttttaccaacagcagcagcagtcggagctgcaacccccggcaccatcggaggacatatggaagaagttcgaacttctgcccacgccgcctctctcgcccagcaggcgtagtggactgtgctccccatcctacgttgccgtgacccccttctccctgcgtggagacaatgatggaggtggtggatccttcagcacggctgatcaattggagatggtcactgagctcctgggcggagacatggtgaatcagagctttatctgcgatccagatgatgagaccttcattaagaatatcatcatccaggattgcatgtggagcggatttagcgctgcggctaaactggtgtcggaaaagttggcgtcctatcaagctgctcggaaagattcaggaagtccgaaccccgcccgtggacactccgtttgcagcacatcctccttgtacctgcaagacttgtctgcagcagcatccgagtgcatcgaccccagcgtcgtgtttccgtatcccctgaacgactccagtagtcccaagagctgcgcgagtcaggattcctccgcattttcgccgtcatcggattcactcttgagcagtaccgagtccagcccacagggcagccccgagccgctggtgctgcatgaggagacgccacctaccacctcctcagattctgaggaggaacaggaggatgaagaggagatagacgtggtgtctgtggagaaacgccaagcccccggaaagcggagtgaatccggaagtccgtccgctggaggacactcgaagcccccccacagccccttggtgctcaagcgctgccacgtttccacccaccagcataactatgccgcccccccttcaacgaggaaagattacccagccgccaaacgcgtgaagcttgacagcgtgcgcgtgctgcggcagatctcgaacaaccgtaagtgcacgtcaccccgctcatctgataccgaagagaacgtaaagagacggacacacaacgtgttggagcgacaacggcgtaacgagctgaagaggagtttcttcgctctgcgggatcagatcccggagctggagaataatgaaaaagcgccgaaagtggtgatcctgaagaaagccacggcttacattctgtcggtgcaggcggaggagcagaagttgatttccgaagaggatctactacgtaagcgtcgagaacagctaaagcacaaactggagcagctgcggaactcttgcgcg

SEQ ID NO: 21150 - DNA, 1317 bp, synthetic construct; identical to SEQ ID NO: 21149
  misc_feature 1..1317: note = source = /note="Description of Artificial Sequence: Synthetic coding sequence"
  source 1..1317: mol_type = other DNA

SEQ ID NO: 21151 - DNA, 1317 bp, synthetic construct
  misc_feature 1..1317: note = source = /note="Description of Artificial Sequence: Synthetic coding sequence"
  source 1..1317: mol_type = other DNA
atgccattgaatgtgtcctttaccaaccgcaattacgatttggactacgatagcgttcaaccttatttttactgcgacgaggaagagaatttctaccagcaacaacagcagtccgagctgcagcctccagcaccgtccgaggatatatggaagaagtttgaactgcttccgacaccgccattgagtccgagtcgcaggtcaggactgtgctctccatcttatgtggcagtgaccccgttctctttgaggggtgacaatgacggaggaggtggttctttcagcaccgcagatcaactggagatggtgactgaacttctgggcggtgacatggtcaaccagtccttcatctgcgatcctgacgatgaaacctttattaagaacattatcattcaggactgcatgtggtccggcttttccgcagcggctaaactggtctctgagaagctggcctcctaccaagcagcaagaaaggatagtggctctccaaaccccgcgcgcggacattctgtctgtagcacctctagcctctatctgcaagacctgagcgccgcagcgtcagagtgtatcgacccttctgttgtattcccttatcccctgaatgactcatcatcccccaagagctgcgcaagccaagactccagcgcattcagcccaagttcagatagtcttctgagcagcacagagtcttcaccgcaaggctcccccgagcctttggtgctccatgaggagacccctccaacgacgtcttcagactccgaagaagagcaggaggatgaggaggagattgacgtggttagtgtagagaaaaggcaggccccgggcaagaggagtgagtctggtagcccgtccgccggcggacacagcaaacctccccactccccactcgtgctgaagaggtgccacgtcagcactcaccagcataactacgcggccccaccctctacaaggaaagactatccggcagctaagcgcgtcaagctcgactccgttagggtgctgagacagattagtaacaatcgcaagtgtacctcaccaagaagttccgatactgaagagaatgtgaagcgcagaacccacaacgtgctcgaaagacaacgcaggaacgaattgaagcgctctttctttgccctcagggatcaaatcccagaacttgaaaacaacgagaaggcaccaaaggtggttatactcaagaaggccaccgcatacatactcagcgtgcaggcagaggagcagaagttgatcagcgaggaggatctgctcagaaaaaggagggagcagctgaaacacaagctcgaacagctgaggaattcctgcgct

SEQ ID NO: 21152 - DNA, 1317 bp, synthetic construct; identical to SEQ ID NO: 21151
  misc_feature 1..1317: note = source = /note="Description of Artificial Sequence: Synthetic coding sequence"
  source 1..1317: mol_type = other DNA

SEQ ID NO: 21153 - DNA, 1317 bp, synthetic construct
  misc_feature 1..1317: note = source = /note="Description of Artificial Sequence: Synthetic coding sequence"
  source 1..1317: mol_type = other DNA
atgccacttaacgtctccttcaccaatagaaattacgaccttgattatgattccgtgcaaccgtacttttactgtgatgaggaggaaaacttttaccagcagcaacagcaatctgagctgcaacctccagcaccttccgaagatatttggaaaaagtttgaactgctcccaactcctccgcttagccctagccggaggagcggactgtgctccccctcgtacgtggcggtgacgccattctcgcttagaggagataacgacggtgggggtggatcgttttcgaccgccgatcaattggaaatggtcacggaactccttggcggagatatggtaaaccaatccttcatttgtgatcctgatgatgagactttcataaagaatatcattatacaagattgtatgtggtccggcttttccgcagcggcaaagctggtgagcgagaagttggcatcgtaccaggccgcaaggaaggatagcggtagcccgaatcccgcacgcggccattcagtgtgctcaacctcatcactgtacttgcaggatctttctgcagcagcttcggaatgtatcgacccctctgtcgtatttccatacccattgaacgattcgtcgagccccaaatcgtgtgcatcgcaggacagcagcgcattttcaccttcatcggattcgctcctttcgtcaaccgaatcatccccacaaggatcgcctgagccgcttgtccttcatgaagagactccacctaccacttcgtctgactctgaggaagaacaagaagatgaagaagaaattgacgtggtgtccgtggaaaagcgccaagctccaggaaagaggtctgaatccggatcacctagcgccgggggccatagcaagcctccgcattcccctctggtcttgaaacggtgccacgtttccacccaccagcacaattacgcggcaccaccaagcacgcgcaaagattacccagcagccaagcgggtgaagctggactcggtgagagtgctcaggcaaatcagcaacaatcgaaaatgcacgtcgcctcggtcaagtgacaccgaggagaacgtcaagaggcggacccataacgtcctggagaggcagcgacgtaatgagcttaagagatcgttctttgcacttagagatcagattcccgaactggaaaacaacgaaaaggcacctaaagtcgtcattcttaagaaggcaactgcatacatcctctccgtccaagctgaagaacaaaagctcatatcggaggaagatctccttcgcaaaaggagagaacagctgaaacacaaactggaacaacttcgtaactcctgtgca

SEQ ID NO: 21154 - DNA, 1317 bp, synthetic construct; identical to SEQ ID NO: 21153
  misc_feature 1..1317: note = source = /note="Description of Artificial Sequence: Synthetic coding sequence"
  source 1..1317: mol_type = other DNA

SEQ ID NO: 21155 - DNA, 1317 bp, synthetic construct
  misc_feature 1..1317: note = source = /note="Description of Artificial Sequence: Synthetic coding sequence"
  source 1..1317: mol_type = other DNA
atgcccctcaatgtgagcttcaccaatagaaattacgatctagactacgattccgtccagccctacttctattgtgacgaagaagagaacttctatcagcagcagcaacagtccgagctccagcctcccgcaccatcagaggatatatggaagaagttcgaactgctcccaaccccccctctgagccccagtcgacgcagcggtctatgctcgccttcatatgtggcggtgaccccgttcagtctgcgaggcgacaatgacgggggaggtggttcattttctaccgcagatcagctggagatggtgactgagcttttagggggtgacatggttaaccagtctttcatttgtgaccccgatgatgaaacctttattaaaaatatcataatccaagattgcatgtggagcgggtttagcgcagctgcgaaactcgtgagcgagaagctagcatcgtatcaggctgcacggaaggatagtggctctcccaacccggctcgagggcacagcgtgtgcagtaccagttccctttacttgcaagacctgtcagccgcggctagcgagtgtatcgaccccagcgttgtcttcccttatccactcaatgacagttcatctcccaagtcgtgcgcttcacaggattccagcgcgttctctccaagcagcgattctcttctttccagtacagaatcttcacctcagggcagcccagagccccttgtcctgcatgaggagacgcctcccaccacctccagcgactcagaggaagagcaggaggacgaagaagagatcgacgtagtcagcgtagaaaaacgccaggcgccgggcaaaaggagtgagtcaggtagtccgtctgccggcggccatagtaaacccccacatagccccctggtcctgaagagatgccatgtaagtacccaccaacataattacgcggcccccccgagcactcggaaagactacccggctgcaaagcgtgtgaaactagattcagtacgtgttcttcgacaaatctccaacaacagaaagtgcacaagccctcgatcgtctgataccgaggaaaacgtcaagcgcaggacgcacaacgttttggaacgccagcgcaggaatgagcttaaaaggtccttctttgcgctacgagaccagattccagaactcgaaaataatgaaaaggcccctaaagtcgttatactgaaaaaggccaccgcttatattctgtccgtgcaggcggaagagcaaaagcttatcagcgaggaagacttgctgcgcaagaggcgggaacagcttaaacataagctcgagcagttgaggaatagctgcgcg

SEQ ID NO: 21156 - DNA, 1317 bp, synthetic construct; identical to SEQ ID NO: 21155
  misc_feature 1..1317: note = source = /note="Description of Artificial Sequence: Synthetic coding sequence"
  source 1..1317: mol_type = other DNA

SEQ ID NO: 21157 - DNA, 1317 bp, synthetic construct
  misc_feature 1..1317: note = source = /note="Description of Artificial Sequence: Synthetic coding sequence"
  source 1..1317: mol_type = other DNA
atgcctctgaacgtatcattcacaaatagaaactacgatctcgattacgacagcgtccagccgtacttttattgcgatgaagaagagaatttttatcagcagcaacagcaatcagagttgcagccgccggccccctcggaagatatatggaagaagtttgagctattgccaacaccccctctgtctccgtctcggcgatcaggtctctgttcaccatcttacgttgccgtcacgccttttagcctgcgcggcgataatgacgggggcggaggctcattcagcactgcagatcagcttgaaatggtcaccgaactcctcggaggcgacatggtcaatcagagctttatttgcgatcctgatgatgagacatttattaaaaacattatcattcaggactgcatgtggtcgggttttagcgcggcggcaaaactggttagcgaaaaattagcgtcttaccaagctgcccgaaaagattcgggctcacctaatcctgcgcggggtcacagcgtgtgttcgacttctagcctctatcttcaagacctgtcggccgccgcttccgagtgtatcgaccctagcgtggtttttccgtaccccttaaacgactcaagctcaccgaaatcatgcgcgtctcaggactctagcgccttttcaccttctagcgattcccttctttcctcaaccgagtcgtcaccgcaaggatctcctgaaccgctagtattgcacgaggaaacgccaccgacaacgagctcggactccgaggaagagcaggaagatgaggaagaaatagatgtcgtgagcgtcgagaagagacaagcgccgggtaaacgctcagagagtgggtccccctctgccggaggccattcaaagccgccgcatagtccgcttgtattaaagcgttgtcatgtgagcacgcatcaacacaattacgctgcccctccgtcaactcgtaaagactacccagctgccaaacgcgtgaaacttgattcagtacgcgtcctgagacagatcagtaacaatcggaagtgcacatctccgcgctctagtgatacggaggaaaatgtgaagcgccggacgcataatgttttagagcgtcaaagacgaaacgaacttaagcgttcgtttttcgctcttcgagatcagatcccggaactggagaacaacgagaaagcgccgaaagtcgtaatcctgaagaaagcaacagcgtacatcctctccgtccaagcagaggaacaaaaacttatatctgaagaggatttattacgcaaacgaagagaacagcttaagcataaacttgaacagttaagaaattcttgtgcg

SEQ ID NO: 21158 - DNA, 1317 bp, synthetic construct; identical to SEQ ID NO: 21157
  misc_feature 1..1317: note = source = /note="Description of Artificial Sequence: Synthetic coding sequence"
  source 1..1317: mol_type = other DNA

SEQ ID NO: 21159 - DNA, 1317 bp, synthetic construct
  misc_feature 1..1317: note = source = /note="Description of Artificial Sequence: Synthetic coding sequence"
  source 1..1317: mol_type = other DNA
atgcccctgaatgtgtcatttactaaccggaattacgatctggactacgactccgtgcagccatatttctattgtgatgaagaagagaacttttaccagcagcagcagcaaagtgagttacaaccacctgccccaagtgaggacatctggaaaaagttcgaactcctgccaacaccacctctttcacccagccggcgttctggactttgttcaccctcctacgtggccgtgactcccttttcactcagaggcgataacgatggcgggggaggctcattctctactgcagaccagcttgaaatggtgaccgagttactaggcggggacatggtgaaccagtcattcatctgcgacccggatgacgaaacctttatcaagaacatcatcattcaagattgcatgtggagcggtttctccgctgccgcgaagttagtgtcagagaagctggcaagctatcaggcagcccgcaaggattctggcagtccaaatcctgcccgtgggcactcggtttgctctaccagttcgctctaccttcaggatttgtccgccgccgcctcggaatgcattgaccctagcgtagtcttcccctacccactgaacgatagcagcagcccgaagtcatgtgccagccaggattcatccgcattctctccatccagcgatagcctcctatccagcacagagtcatctccccagggctcccctgagcctctagtgctgcatgaggaaacccctcctaccaccagctcggattccgaagaagagcaagaggacgaagaagaaatagatgtggtctctgtcgaaaagcggcaagcccccggcaaacgaagcgaaagcggatcaccatcagcgggcggtcactccaagccaccgcactcacccttggtgctgaaaaggtgtcatgtctctacccatcagcacaactacgctgcgcccccctctacaagaaaagattaccctgccgcaaagcgggtaaaactagatagtgtgagggttttacgccagatctccaataataggaagtgcacttccccacgcagcagtgacacagaggaaaatgtgaagcgacggacacataacgtgctggaacgtcagcgtcgcaacgagctcaaacgctcattctttgcgctgagggaccagattccagagctcgagaacaacgagaaagcccctaaggtggtcattttgaaaaaggccacagcatacatcctgagtgtccaggccgaagagcaaaaattgatctccgaagaagatctgctgagaaagcgtagagaacagcttaaacataagctcgagcagttgaggaattcctgtgca

SEQ ID NO: 21160 - DNA, 1317 bp, synthetic construct; identical to SEQ ID NO: 21159
  misc_feature 1..1317: note = source = /note="Description of Artificial Sequence: Synthetic coding sequence"
  source 1..1317: mol_type = other DNA

SEQ ID NO: 21161 - DNA, 1317 bp, synthetic construct
  misc_feature 1..1317: note = source = /note="Description of Artificial Sequence: Synthetic coding sequence"
  source 1..1317: mol_type = other DNA
atgccattgaacgtctcttttaccaatcgaaactacgatctcgattatgattcggtccagccttacttctattgcgatgaggaggagaacttctatcagcagcagcagcagtccgagctgcagccgcccgccccatctgaggatatttggaagaaatttgagcttctcccaactcccccactgagcccctctcggcgctccggactgtgcagccccagttatgtggccgtaacacccttttctttgcggggagacaacgacggcggcggcggcagtttttcaaccgccgaccagctagaaatggttaccgagctcctcgggggggacatggtcaaccagagcttcatttgtgacccagacgacgaaacctttatcaagaacatcatcatacaggattgtatgtggtctggcttcagtgctgcggccaagctagtgagcgagaaactcgcttcctatcaggcggcaaggaaagactccggctccccgaatcctgcgcgcgggcacagcgtgtgctccacaagctctctgtacttgcaggatctgtcggccgcagcttccgaatgtatagaccccagcgtggttttcccctaccctctgaacgacagtagctccccaaaaagttgtgccagccaggactccagtgcattctccccttccagcgactcactcttatcatccaccgagagctctccgcaggggtctcctgagcccctagtgttgcatgaagaaaccccgcccacaacttcttctgactcagaagaggagcaggaggatgaggaagagatcgacgtggtgagtgtcgaaaaacggcaggctcctggaaagcgtagtgaatcaggatccccgagcgccggaggccactcaaagccgccacactctcctttggtgttaaaacgctgtcacgtctccacccaccagcacaactacgccgcgccccccagcacccggaaagattatcccgcggcaaagcgagtgaaactggacagcgtccgtgtgctgaggcagatcagcaataacaggaaatgcacaagcccgcgctcaagtgacacagaggagaacgtaaagcgacgcacccacaacgtgttggagaggcagcgcagaaatgaactgaagcgtagcttcttcgcactgagggatcagatccccgaactcgaaaataacgagaaggcaccaaaagtcgtcatcctgaaaaaagccactgcctatattttgagcgtccaagcggaagagcagaagctaatttcagaggaagacttacttagaaagcgccgcgaacagctcaaacataaactggagcaacttaggaattcgtgcgcc

SEQ ID NO: 21162 - DNA, 1317 bp, synthetic construct; identical to SEQ ID NO: 21161
  misc_feature 1..1317: note = source = /note="Description of Artificial Sequence: Synthetic coding sequence"
  source 1..1317: mol_type = other DNA

SEQ ID NO: 21163 - DNA, 1317 bp, synthetic construct
  misc_feature 1..1317: note = source = /note="Description of Artificial Sequence: Synthetic coding sequence"
  source 1..1317: mol_type = other DNA
atgcccttgaatgtgtcctttacgaatagaaattacgatctggattacgactcggtgcagccttacttctactgcgatgaggaagagaatttctatcagcaacagcaacagtccgagttgcagccgcccgcgccctctgaggacatttggaaaaagtttgagctattgcccaccccaccattgagtccttctcgacggtccggactgtgcagtccctcatatgttgcggtgactcctttttcactccggggagataacgatggcgggggggggagcttttcaacagctgatcagttggaaatggtgactgaactgctgggtggcgacatggtgaatcagtccttcatctgtgatcctgatgacgagacctttattaaaaacatcatcatccaggactgcatgtggtcagggttcagtgctgcagccaagctggtctctgagaagttagcaagctatcaggcagctaggaaggactccgggtccccgaatcccgctagaggacactctgtctgctctacgtcttcactgtatttgcaggacctctctgccgccgcttcagaatgcatagaccccagcgtggtcttcccctatccactgaacgactcttcatcacccaagtcctgcgccagccaggattcatctgctttctccccctcctctgattccttgctctccagcactgagtctagtccccagggctcacctgaacccctggtgctccacgaggaaacaccacctactacctcatccgatagtgaggaggaacaggaagatgaggaggagattgacgtggtaagcgtcgaaaaacgacaggctcccgggaagcgttctgaatcaggcagcccctcagcaggtggccactcaaaacccccacatagtccacttgtgctcaaacggtgtcacgtgtctacacaccagcacaactacgcagcccccccttctactaggaaggattaccccgctgcgaaacgggtgaaactcgactctgtcagggttcttaggcagataagcaataatcgtaagtgtacatcccctaggagcagtgacaccgaagagaatgtaaagaggcggactcacaatgtgctggagagacaacgccgcaatgagctgaagcgtagcttttttgcattgagagaccagatccctgaactggaaaacaatgagaaagcccccaaggttgtcatcctcaagaaagcaaccgcctatatcttgtctgtgcaagctgaggagcagaagctaatctccgaagaagatctgctcaggaagcgcagagagcagctgaaacataagctggaacagcttaggaactcatgcgcc

SEQ ID NO: 21164 - DNA, 1317 bp, synthetic construct; identical to SEQ ID NO: 21163
  misc_feature 1..1317: note = source = /note="Description of Artificial Sequence: Synthetic coding sequence"
  source 1..1317: mol_type = other DNA

SEQ ID NO: 21165 - DNA, 1317 bp, synthetic construct
  misc_feature 1..1317: note = source = /note="Description of Artificial Sequence: Synthetic coding sequence"
  source 1..1317: mol_type = other DNA
atgccacttaatgttagcttcacgaaccggaactatgacctcgattatgactcagtgcagccgtatttttactgtgatgaggaggagaacttttaccagcagcaacagcagtctgaactgcaacccccagctcctagtgaggatatctggaagaagttcgagctcttgcccacaccaccgctctctccttcacgcagatcagggctttgtagccccagctatgtggcagttactcctttctctctgcggggggataatgacggcgggggaggaagcttttctacggctgaccaactcgagatggtcaccgagctcctggggggagatatggtgaaccagagcttcatttgtgacccagacgacgagacctttatcaaaaacatcataattcaggactgtatgtggtctggattttctgccgcagccaaattggtttctgagaagctagcctcctatcaggccgcgaggaaggattctggatctcctaatcctgccagagggcactccgtgtgttccacttcaagtctctatcttcaggacctgagtgccgccgcctcagaatgtatcgatccaagcgtggtatttccataccccctgaacgactccagctcacccaaatcatgcgcctcccaagactcctcagccttctccccctcaagcgacagtttactgtcttctaccgaatccagtccacaaggttctcccgaacccttagtccttcacgaagagacacccccaaccactagtagcgattcagaggaagagcaggaagacgaggaagagatcgacgtggtaagtgtggagaaaaggcaggcccctgggaagagatccgagagcggctctccatcagctgggggccattccaagcccccccacagccccctcgtgctgaagaggtgccatgtctccacccatcagcacaactatgctgccccaccttcaacacggaaggactaccccgccgccaagagggttaagctagattcggttcgcgttcttaggcagattagcaataatcggaagtgtaccagtcctcgatcaagcgatacagaggaaaatgtcaagcgcagaactcacaacgtccttgaaaggcagcggagaaatgaattgaagagaagcttcttcgccttgcgagatcaaatacctgagttagagaataacgagaaggcacctaaggtggtgattctcaagaaagctaccgcatacatcctaagtgtgcaggctgaggaacagaaacttatctcagaagaggacctactcaggaaacggcgggagcagctgaaacataaactggagcaacttcgcaactcgtgcgcc

SEQ ID NO: 21166 - DNA, 1317 bp, synthetic construct; identical to SEQ ID NO: 21165
  misc_feature 1..1317: note = source = /note="Description of Artificial Sequence: Synthetic coding sequence"
  source 1..1317: mol_type = other DNA

SEQ ID NO: 21167 - DNA, 1317 bp, synthetic construct
  misc_feature 1..1317: note = source = /note="Description of Artificial Sequence: Synthetic coding sequence"
  source 1..1317: mol_type = other DNA
atgccgcttaacgtctcattcaccaaccgcaactacgacctggattacgattctgtgcaaccatacttctactgcgacgaggaagaaaacttttaccagcagcagcaacagtcggaactccagccacctgcaccgagcgaagatatctggaagaagttcgagttgctcccgaccccgccgctgagcccatcacgcagaagtggactctgctcaccgtcatacgtggcagtgactcccttttcgctgcgcggagacaatgacgggggcggtggatccttctccactgcggaccagctggaaatggtcacggagttgctgggaggagacatggtgaaccaatcctttatctgcgatccggacgacgagacgttcataaagaacataatcatccaagactgcatgtggagcgggttctcggccgcggctaaattggtgtccgaaaagctcgcctcctaccaagctgccaggaaagactcgggatccccaaatcctgctcggggtcatagtgtgtgctcgacttcatcactgtatctgcaagacctctcagcggccgccagcgaatgtattgacccctcggtggtatttccttacccgctgaacgattcatccagtccgaaatcgtgtgcgtcacaagactcatctgccttctccccatcctccgactcactgctcagcagcactgaatcctcgccgcaggggagcccagaacccctcgtgctgcacgaagaaaccccacctacgacctcctccgattcggaagaggagcaggaggatgaggaggaaattgatgtggtgagcgttgaaaagcgccaggctccgggcaagcggtcagagtccggctctccgtccgcaggaggacactccaagcccccgcactccccgctcgtgctcaagcggtgtcatgtctctacccatcaacacaattatgcggcgccaccgtccacccgcaaagattaccctgctgcaaaacgagtgaaacttgactctgtgcgggtcctcaggcaaatctctaacaaccgcaagtgcacctcgcctagaagctcggacactgaggaaaatgttaagcgcaggactcataatgtgctggagcggcagcgtaggaacgagttgaagcggtctttcttcgcactgcgggatcagatcccagaactggaaaacaacgaaaaggcccccaaggtcgtgatcctgaaaaaggctaccgcttacatcctctcggtccaagccgaggagcagaagctgatctcggaggaggatctgctgaggaaaagacgcgaacagcttaagcacaagctggagcagctccgcaattcctgcgcg

SEQ ID NO: 21168 - DNA, 1317 bp, synthetic construct; identical to SEQ ID NO: 21167
  misc_feature 1..1317: note = source = /note="Description of Artificial Sequence: Synthetic coding sequence"
  source 1..1317: mol_type = other DNA

SEQ ID NO: 21169 - DNA, 1317 bp, synthetic construct
  misc_feature 1..1317: note = source = /note="Description of Artificial Sequence: Synthetic coding sequence"
  source 1..1317: mol_type = other DNA
atgccactaaatgtgtcctttacgaatagaaactatgatctggattacgattccgttcagccctacttctactgtgacgaagaagaaaacttttaccagcagcagcaacagtctgaactacagccacccgctccaagcgaggacatctggaagaagtttgagctgctgcccacacctcccctctccccaagccggaggagcgggctttgcagcccatcatacgtagctgtcactccgtttagcctgaggggcgacaacgacggaggagggggatcatttagtaccgccgatcagctcgaaatggtaacggagctgttaggtggggacatggttaatcagagctttatctgcgatcccgatgacgagacctttatcaaaaacataataattcaggactgcatgtggtctggcttcagcgctgccgcaaaactggtgagcgagaagctcgcctcgtatcaggccgcccgcaaagacagtgggtccccaaaccctgctcgtgggcactcagtgtgctcaacgagttccttatatctgcaggacctgagcgccgctgccagcgaatgcattgacccttccgttgtgttcccataccccctgaacgacagttccagtcccaagtcatgcgcctcccaggactcctccgcctttagcccgagcagtgacagcctgttgagcagtaccgagtcaagcccccagggaagtccagaacccctcgtacttcatgaggagacccctcctactacaagtagtgacagcgaggaagagcaggaagacgaggaagaaattgatgtagtgagtgttgaaaaaaggcaggctcccggtaaacggtccgaaagtgggtctccttctgctggcggacatagcaaacctcctcactctcccctggtccttaagcgctgtcacgtttccacacatcaacataattacgccgcgccccccagtaccaggaaagactacccggccgctaaacgggtgaagctggattccgtgcgcgtgctgcggcagatctccaacaataggaagtgtacatctcctcgatcttccgacactgaagagaacgttaaaaggcggacacataatgttttggaaagacagagaagaaatgagctgaagcgatctttcttcgccctccgggaccagatccctgagctagaaaataacgagaaggctccaaaagtggtcatcctgaaaaaagctaccgcctatatcttaagcgtgcaggccgaggaacagaagcttataagcgaggaagacttgctgaggaagcggcgtgaacagctgaagcacaagttggagcagctgcgcaactcatgtgcc

SEQ ID NO: 21170 - DNA, 1317 bp, synthetic construct; identical to SEQ ID NO: 21169
  misc_feature 1..1317: note = source = /note="Description of Artificial Sequence: Synthetic coding sequence"
  source 1..1317: mol_type = other DNA

SEQ ID NO: 21171 - DNA, 1317 bp, synthetic construct
  misc_feature 1..1317: note = source = /note="Description of Artificial Sequence: Synthetic coding sequence"
  source 1..1317: mol_type = other DNA
atgcctctgaacgtgtccttcaccaaccgcaattatgacctggattatgatagcgtacagccttacttttactgtgacgaggaagagaacttctaccagcagcagcaacagtccgagttacagccaccggcaccaagtgaggacatatggaaaaagtttgagctactgcccaccccacccttgagccctagtaggaggtccggcctgtgcagtccgtcctatgttgccgtcaccccatttagtctccgcggagataacgatggcggtgggggtagcttctcaacagctgatcagctagaaatggtcaccgagctgttggggggtgatatggtgaaccagtcattcatttgtgatcctgatgacgagacctttatcaaaaacatcatcattcaggactgtatgtggtctggcttctctgctgccgctaagctcgtatccgagaagcttgcctcttatcaggctgcaagaaaagattctggctcccccaacccagcacggggacactcagtgtgctcaacctccagcctataccttcaggatctctccgccgccgcctccgagtgcatcgatcccagcgtggttttcccttatccgttaaacgattctagttcccccaaaagctgcgcaagtcaggatagctctgccttttcgccaagttccgattcactgctgagcagtacagagtcttctccgcagggctctcccgaacctcttgtactgcacgaggagaccccacccaccaccagcagtgactctgaggaggagcaggaggacgaagaagaaatagacgtggtctccgtggagaaacggcaggcaccaggaaagagaagcgaatctggttcaccttctgccggtggtcattcaaagccacctcattccccactggtcctgaaaagatgtcacgtttccactcaccagcataactacgccgctccgcctagcactagaaaggactaccccgccgctaaaagggtcaagctcgacagcgtccgggttctgcgacaaatctctaacaacaggaagtgtacaagcccacgctcatctgacacagaagaaaacgtgaagaggcgcacacataacgtcttggagcgccagcggcgtaacgaacttaagcgtagctttttcgcactgcgcgatcaaatccctgagctcgaaaacaatgagaaggcccctaaagttgtcattctcaagaaagccacagcttatatattgagcgtccaggcagaggagcagaagctgatatctgaagaagacctgctgcgtaaacgacgcgagcagctcaagcacaagctggagcaactaagaaattcctgcgcc

SEQ ID NO: 21172 - DNA, 1317 bp, synthetic construct; identical to SEQ ID NO: 21171
  misc_feature 1..1317: note = source = /note="Description of Artificial Sequence: Synthetic coding sequence"
  source 1..1317: mol_type = other DNA

SEQ ID NO: 21173 - DNA, 1317 bp, synthetic construct
  misc_feature 1..1317: note = source = /note="Description of Artificial Sequence: Synthetic coding sequence"
  source 1..1317: mol_type = other DNA
atgcctttgaatgtttcatttaccaaccgcaattatgatctcgattacgacagcgtgcagccttacttttattgtgacgaggaggaaaatttttatcagcaacagcagcagtccgagctgcagcctccagcaccctccgaggatatatggaagaagttcgagctgttgcctacccctcctttatccccgtcacggagatccggtctatgctcccccagctacgtggcagtcaccccattctctcttaggggggacaatgacggagggggcggcagcttctcaactgcagatcagctcgagatggtgacggaactgctaggtggggatatggtgaaccagtccttcatttgtgatccggacgatgaaaccttcataaagaacatcatcatccaggattgcatgtggagtggtttttctgccgctgccaagctggtgtctgaaaaactcgcgagctaccaggccgcccggaaggactctggctcccccaatcccgctcgaggacattccgtctgtagcacctcttccctttatctacaagacctcagtgcagccgcctcagagtgtatcgacccctccgtcgtgttcccttaccctttgaacgactcctcaagtccgaaatcctgcgctagccaggactcctccgccttcagccccagctcggacagcttgctcagttccacagaaagctcaccccagggaagcccggagccactggtgctccacgaggaaacaccacccacaacctcttctgactcggaggaggagcaggaggatgaggaagagatcgatgtcgtctccgtcgagaaacgacaagcaccaggcaagcgatccgaatccggctctccttctgcaggggggcattcgaagcccccccactcccctttagtgctgaagaggtgccatgtttcaacacaccagcacaattatgctgccccaccaagcactcgaaaggactatccagctgcaaagcgggtaaagctggacagtgtaagggtcctcaggcagatctcgaataaccgcaagtgtacctcccccaggtcctccgacactgaagaaaacgtgaagcggcgaactcacaacgtcctcgagagacagcggaggaatgaactgaaaagaagtttttttgcactgagagaccagataccggaattagaaaataacgaaaaggcccccaaagtggtaatcctaaaaaaggccaccgcgtacattctaagtgtccaggctgaagagcagaagctgattagcgaagaggacctgcttcgtaaacgcagagaacagttgaaacacaagctggaacagctgagaaactcttgcgca

SEQ ID NO: 21174 - DNA, 1317 bp, synthetic construct; identical to SEQ ID NO: 21173
  misc_feature 1..1317: note = source = /note="Description of Artificial Sequence: Synthetic coding sequence"
  source 1..1317: mol_type = other DNA

SEQ ID NO: 21175 - DNA, 1317 bp, synthetic construct
  misc_feature 1..1317: note = source = /note="Description of Artificial Sequence: Synthetic coding sequence"
  source 1..1317: mol_type = other DNA
atgcctctgaatgtgtcctttactaataggaattatgatctggactacgactcggtacagccgtacttttattgtgacgaagaagaaaacttttaccagcagcagcagcagagtgagcttcagccgccagctcctagtgaggacatatggaaaaagttcgagctgcttcctacgcccccactaagcccttctcgacgaagcggtctgtgctctcctagctatgtggcggtcactcccttctcactccgtggagacaacgatgggggaggcggatccttctctacagccgaccagttggagatggttactgagctattgggcggggatatggtgaatcagtcttttatttgcgatcctgacgatgagactttcatcaagaacataataattcaggactgtatgtggagcggattttctgccgccgccaaactggtgtctgaaaagctcgcatcctaccaggctgcgcgcaaggattctggttctcccaatcctgcgagagggcatagcgtgtgcagcacaagctctctttatctgcaagacttaagcgccgccgcttcagaatgtattgatcccagtgtagtgttcccgtatcctctgaatgattcctcctcacctaaatcatgcgctagtcaagactcttctgcattttctccctcctctgactccttactgtcttctaccgagagcagtccacaggggtcccctgagccacttgtgttacatgaggaaacacccccaaccaccagctctgatagcgaggaggaacaagaagatgaggaggagatagatgtggtgtctgtcgagaaaagacaagcgcctggcaagcgttctgagtccggctcccctagtgccgggggccacagtaagcccccccactcaccattggtgctaaaacgatgccacgtctccacccaccaacataattacgcagcccctcctagtacacggaaagattatcccgcagccaagcgagttaagctggactcagtgcgggtgctgcgtcagatctccaacaacagaaaatgcacctcaccgagatcctcagacacagaggagaatgtaaagcgccgtacacacaacgtgctggaaagacagcgcagaaacgagctgaagcgatcattcttcgcattacgcgaccagataccggaacttgaaaataatgaaaaggctcctaaggtcgtcatcctaaaaaaggctaccgcctatattctgtccgtgcaagccgaggagcagaagctcatatccgaggaggacctgttacggaagcggcgggagcagctgaaacacaaactggagcagctgagaaatagttgtgca

SEQ ID NO: 21176 - DNA, 1317 bp, synthetic construct; identical to SEQ ID NO: 21175
  misc_feature 1..1317: note = source = /note="Description of Artificial Sequence: Synthetic coding sequence"
  source 1..1317: mol_type = other DNA

SEQ ID NO: 21177 - DNA, 1317 bp, synthetic construct
  misc_feature 1..1317: note = source = /note="Description of Artificial Sequence: Synthetic coding sequence"
  source 1..1317: mol_type = other DNA
atgccattgaacgtgagctttaccaacaggaactacgaccttgactacgatagcgttcaaccatacttttactgcgatgaagaagagaacttctaccagcaacagcaacagagcgagcttcagccccctgcgcccagcgaggatatctggaaaaagtttgagcttctcccgacgcctccactctcgccttcgcggagatcaggactttgttcacctagctacgtcgccgtgacgccattttcattgaggggggacaacgacgggggaggtggtagcttcagcactgctgaccagcttgaaatggtgaccgaactcctgggcggggatatggtgaatcagagcttcatatgcgaccctgatgatgaaactttcataaagaatatcataattcaagactgcatgtggtcgggattctcggcagctgcaaaacttgtctcagaaaagctcgcaagctatcaagccgcgcggaaggacagtgggtcgcctaatcctgcgcgtggccattcagtgtgttcaacttcctccctttacttgcaagatctgtccgcagccgcctcggagtgtatcgatccttcagtggtgtttccatatcccctgaacgatagttcgtcccctaagtcatgtgccagtcaagattcgtccgctttttccccctctagcgattcacttctgtcctccaccgaatcgagccctcagggatcgcctgaaccgttggtgctccatgaagaaaccccgcctactactagcagcgacagcgaggaggaacaggaagatgaggaggaaatagatgtcgtgtcggtggagaaacggcaagcaccaggtaagcggtcggaatcaggtagcccatccgcaggaggacattccaagccaccgcattccccacttgtgctgaagcgctgtcacgtgtccacccatcagcacaactacgccgccccaccgtccacccgaaaggattacccagctgcgaagagagtgaagctcgattccgtgcgagtcctgcgccaaattagcaataatcgtaaatgcacctctcctcggtcatccgacaccgaagagaacgtgaaacggcgcacccacaatgtacttgaacggcaaaggcgcaacgaactgaagagaagttttttcgcactgcgcgaccagatcccagaactggaaaacaacgagaaggcccccaaagtcgtgattctgaagaaggcaactgcttacattttgtcggtgcaggcggaagagcaaaagctcatttccgaagaggatctgcttagaaagagacgggagcaactgaagcacaaattggaacagcttagaaacagctgtgca

SEQ ID NO: 21178 - DNA, 1317 bp, synthetic construct; identical to SEQ ID NO: 21177
  misc_feature 1..1317: note = source = /note="Description of Artificial Sequence: Synthetic coding sequence"
  source 1..1317: mol_type = other DNA

SEQ ID NO: 21179 - DNA, 1317 bp, synthetic construct
  misc_feature 1..1317: note = source = /note="Description of Artificial Sequence: Synthetic coding sequence"
  source 1..1317: mol_type = other DNA
atgccgcttaacgtgtccttcactaacagaaactacgacctggattatgattctgtccagccgtacttctactgcgacgaggaggagaacttctaccagcagcaacagcaatccgagctgcaacctccagcgccatctgaagatatttggaagaagtttgaactgctgccgactccgcctctcagcccatcgcgccgctcgggcctctgctcaccgtcgtacgtggcggtgacccctttctcgctccggggagacaatgatggcggtggtggatcctttagcaccgcagatcagctggaaatggtgaccgagcttcttgggggagacatggtaaaccaatccttcatctgtgacccagacgatgaaacgttcatcaagaacatcatcatccaggactgcatgtggagcggtttctccgcggccgccaagctggtgtcagaaaaactggcctcctaccaggcagctcgcaaggattcgggatcccctaatccagcccggggacattcagtctgcagtacgtcatcgctgtacctccaggacttgtcggcggccgctagcgagtgcatcgaccccagtgtggtgttcccatatcctctcaacgatagctcgtcacccaagtcgtgtgcatcgcaagattcctcggcgttctctccctcctcggattctctcctttcctccactgagtcgtcgccacagggctcgcccgaacctctggtcctgcacgaggaaaccccaccgacgacttcgtcggactctgaagaagaacaagaagatgaggaagaaatcgacgtggtgtcggtggagaagcgccaagctccggggaagaggagcgaatcgggatcgccttcagccgggggccacagcaagccaccgcactcgccactggtgctcaaaagatgtcatgtgtccacccaccagcacaattacgcagccccgccttcgacgcgcaaagattacccggcagccaagcgggtcaaattggactcggtgagagtcctgcggcagatcagcaacaatcgaaagtgcacttcgcccagaagctccgacaccgaagaaaacgtgaaacggagaacccacaacgtcctggagcgacagcggcgaaacgaactgaagcggagcttcttcgccctgcgcgaccagatccctgaactcgagaacaatgagaaagccccgaaggtcgtgatcctcaagaaggccactgcctacatcctgtccgtgcaagccgaggaacaaaaactcatctcagaggaggatctcctccgaaaaaggcgcgaacaactcaagcataagctggagcaactcaggaattcgtgcgcg

SEQ ID NO: 21180 - DNA, 1317 bp, synthetic construct; identical to SEQ ID NO: 21179
  misc_feature 1..1317: note = source = /note="Description of Artificial Sequence: Synthetic coding sequence"
  source 1..1317: mol_type = other DNA

SEQ ID NO: 21181 - DNA, 1317 bp, synthetic construct
  misc_feature 1..1317: note = source = /note="Description of Artificial Sequence: Synthetic coding sequence"
  source 1..1317: mol_type = other DNA
atgccactcaacgtgtccttcactaatagaaattacgatcttgactacgattcggtgcagccttacttttactgtgacgaagaagagaacttctaccagcagcaacagcagagcgaactgcagccgcccgcaccttcagaagatatctggaagaagtttgagctccttcctactcccccgctgagcccttcgcggagatccggcctctgttcaccaagctacgtggcagtgactcctttctcattgcggggtgataatgatggaggcggtggatcttttagcactgcggaccagcttgaaatggtgactgagctcctggggggtgatatggtgaatcagtcattcatctgcgatcctgatgatgaaaccttcattaagaacatcataatccaagactgtatgtggtcaggattcagcgcggcggccaagctcgtctcggagaagctggcatcctaccaagcagcccggaaggactcaggatccccaaatccggcgagaggacattcggtgtgcagcacctcctcgctctatcttcaagatctgagtgcagccgcatcagaatgcattgacccatcggtggtgtttccgtatcctctcaatgactcaagctcgcccaaatcctgcgcatcccaagactcgtctgcattttccccttccagcgactcccttctttcgagcaccgagagctcaccccaggggtcaccagaaccactggttctccacgaagaaacgccccctactacttcttcagattcagaggaagagcaggaagatgaagaagaaattgatgtggtgtcggtcgaaaagaggcaggcaccagggaagcggagtgaaagcggatcgccttcagcaggaggccactccaagcctcctcattcgccccttgtcctgaaaagatgccatgtgagcacccatcaacataactacgcagcccctccttcgacccgcaaagattacccagcagctaagcgcgtgaaactggactccgtcagggtgttgagacagatctcaaacaacagaaagtgcaccagccctaggagctcggatactgaggaaaacgtgaagcgcaggacccacaacgtgctggagcgacaacggcggaacgaactgaaacgttcatttttcgccctccgtgaccaaattcccgagctcgaaaacaacgaaaaggcaccaaaggtcgtcattctcaaaaaagcaactgcatacattctgagcgtgcaggcagaggaacagaaactcatctccgaggaagatctgcttagaaagaggcgggaacagcttaagcataagctggaacaactgagaaactcctgcgca

SEQ ID NO: 21182 - DNA, 1317 bp, synthetic construct; identical to SEQ ID NO: 21181
  misc_feature 1..1317: note = source = /note="Description of Artificial Sequence: Synthetic coding sequence"
  source 1..1317: mol_type = other DNA

SEQ ID NO: 21183 - DNA, 1317 bp, synthetic construct
  misc_feature 1..1317: note = source = /note="Description of Artificial Sequence: Synthetic coding sequence"
  source 1..1317: mol_type = other DNA
atgcctctcaacgtgtcctttactaataggaattatgacttggactacgattctgtgcagccatacttctactgcgatgaggaagagaacttctaccagcaacagcaacagtctgaactccaacccccagctccttcagaggacatctggaagaagttcgagctcctgccgactcccccgctgtcgccaagccgtaggtcaggactttgcagcccatcgtacgtagcagtgacgccgttctccctgcgcggggacaatgatgggggcggaggcagtttttcaaccgctgaccagttggagatggtgaccgaactgctcggaggagatatggtcaaccaaagtttcatctgcgatccggacgatgagactttcatcaagaacatcattatccaggattgcatgtggtcaggattttccgcggcggctaagctcgtgagtgagaaactggctagctaccaggcggcgcggaaggactcgggatcccccaatccagcgcgcggacactcagtctgttcgacgagctcattgtatctgcaagacctttccgccgccgcatcggagtgcattgatccctcggtggtttttccgtacccgctgaacgactcgtcctcaccaaagagctgcgcttcccaggactcgtcggccttcagtccgtcgtctgactcgctgctgtcatccacggaatcaagcccccaagggtcccctgaaccgctggtcctgcatgaagaaactccccctaccacttccagcgactcggaagaggaacaagaagatgaagaggaaattgacgtggtgtccgtggaaaagaggcaggctccgggtaagcgatccgagtcaggtagcccttccgcaggcggtcactccaagccgccccactccccgctcgttctgaaacgctgtcatgtgagcacccatcagcataactacgcagcaccgccctcgactagaaaggactacccagccgcaaagagggtcaaactggattcggtgagagtgctccgccaaatctctaacaaccgcaagtgtacttcgcctcgctcgtccgatacggaggaaaatgtgaagcggagaactcacaatgtcctcgagcggcaaagacgcaatgaactgaaaaggtcattcttcgcgctgcgggaccagatccccgagctcgaaaacaatgaaaaggcgcctaaagtcgtgatcttgaagaaggcaaccgcctacatcttgtccgtgcaggcagaggaacagaaactcatcagcgaagaggatcttcttcggaagagacgcgagcaactgaaacacaaactcgagcagctgcggaactcctgcgcg

SEQ ID NO: 21184 - DNA, 1317 bp, synthetic construct; identical to SEQ ID NO: 21183
  misc_feature 1..1317: note = source = /note="Description of Artificial Sequence: Synthetic coding sequence"
  source 1..1317: mol_type = other DNA

SEQ ID NO: 21185 - DNA, 1317 bp, synthetic construct
  misc_feature 1..1317: note = source = /note="Description of Artificial Sequence: Synthetic coding sequence"
  source 1..1317: mol_type = other DNA
atgccgctcaacgtctcttttaccaaccggaactacgatctggattacgactccgtgcagccttatttctattgcgacgaggaagaaaacttctatcagcagcagcagcagagtgagctccagcccccagcaccctctgaggatatttggaagaagtttgagctgcttccaacgccacctctgtccccatcacgcaggagtggcttgtgtagccctagctatgtggcggtcaccccctttagtctgcggggcgataatgacggggggggtggtagttttagtaccgctgaccaattggagatggtcactgagctcctcggcggcgacatggtgaaccagtccttcatatgcgacccggacgacgaaacttttatcaagaatatcattatacaggactgtatgtggtcaggcttctctgctgccgccaagttggtgagtgaaaagctggcctcttatcaggccgccaggaaggactctggctcacccaaccccgcgagaggccatagcgtgtgcagcaccagtagcttgtacctgcaggatttgagcgccgccgcgtcagagtgtatcgatccttctgttgtcttcccgtacccactgaatgacagttcgagccccaagtcctgtgccagccaggactcctcagccttttcaccttccagtgactccctgctttcaagcacggagtcatcgccccagggctctcctgagccactagtcctccacgaagagacaccgcctaccacaagcagcgattctgaggaggagcaggaggatgaggaggagatcgacgtggtgtctgtggaaaaacgacaggcacccggcaagaggagtgagtccggttctcccagtgctggcggacactctaaaccaccacatagccccctagtactgaaaagatgtcacgtctcaacccatcagcataattatgccgcgccacccagcactagaaaagattatccagccgctaaaagagtgaagctagatagtgtccgggtgttgcgtcaaataagcaataatcgtaagtgtacaagtccaagaagctctgacaccgaggagaacgttaagaggcgtacccataatgtgctggagaggcagaggagaaacgaactcaaaagatctttctttgctcttagggaccagatccccgagctagagaataatgagaaggccccgaaggttgtgattctaaagaaggccaccgcttatatcctgtctgtccaggcggaagaacagaagttgataagcgaggaagacctgttgcgcaagcgcagagaacagttaaagcacaagctagagcagctgagaaactcctgcgcc

SEQ ID NO: 21186 - DNA, 1317 bp, synthetic construct; identical to SEQ ID NO: 21185
  misc_feature 1..1317: note = source = /note="Description of Artificial Sequence: Synthetic coding sequence"
  source 1..1317: mol_type = other DNA

SEQ ID NO: 21187 - DNA, 1317 bp, synthetic construct
  misc_feature 1..1317: note = source = /note="Description of Artificial Sequence: Synthetic coding sequence"
  source 1..1317: mol_type = other DNA
atgcctcttaacgtctcattcacaaatagaaactacgatcttgactacgattcagtgcaaccatacttctattgtgacgaagaagaaaatttttatcaacaacagcagcagtccgagctgcaaccacctgcgcctagcgaggacatttggaagaaatttgaactgctacccaccccgccactctctccctcacgtcgttctggactgtgttcaccttcctatgtagctgtcactcccttttcactgcgcggggataacgacggggggggaggcagcttctcaaccgccgaccagttagagatggtgacagagctcctcgggggcgatatggtaaaccagagctttatttgtgacccagacgacgagacctttatcaagaatatcataatccaggactgtatgtggtcaggattcagcgcggccgccaaattggtatccgagaaattggcctcataccaggctgcaaggaaggactcaggttcacccaacccggcccgagggcattcggtctgcagcacctcgtccctatatcttcaggatctttccgcggcggcctcagaatgtattgatccatccgtggtatttccatatccacttaacgatagtagcagcccaaaatcatgtgcatcccaggattccagcgcattcagccccagttccgattcactgctgtcttccacagagagctccccgcagggctctcccgagcctctggttcttcatgaggaaacaccgcccactacctcttccgactcagaggaagagcaggaggatgaggaagagatagacgtcgtctctgtggagaaacggcaggctcctggcaaacgttccgagtcaggaagcccttcagcaggcgggcacagtaagccgccacattctcctcttgtgctaaagcgttgtcacgtctctacccaccagcataactacgcagcaccacccagcacacgaaaggattatcccgccgcgaagcgtgttaaattggacagtgtccgagttttaaggcagatatccaataaccgcaagtgcacctccccgcggtcatcagatacggaggagaacgtgaagaggagaactcacaacgtgcttgagaggcagaggcgtaatgagcttaagcgctcgttctttgcactgcgggatcagatccctgaattggagaataacgaaaaggcccccaaggtcgtcatcttgaaaaaggccacggcatatattttgagcgtccaggcggaggagcagaagttaatctctgaggaggacttattgcggaaacgcagggagcaactcaaacataagctggagcagctgaggaattcatgtgct

SEQ ID NO: 21188 - DNA, 1317 bp, synthetic construct; identical to SEQ ID NO: 21187
  misc_feature 1..1317: note = source = /note="Description of Artificial Sequence: Synthetic coding sequence"
  source 1..1317: mol_type = other DNA

SEQ ID NO: 21189 - DNA, 1317 bp, synthetic construct
  misc_feature 1..1317: note = source = /note="Description of Artificial Sequence: Synthetic coding sequence"
  source 1..1317: mol_type = other DNA
atgcctctgaacgtctcttttacgaatagaaattacgacttggattacgattcggtgcagccctatttctactgcgatgaagaggaaaacttttaccagcagcagcaacaatcagagcttcagcctccagccccttccgaagatatttggaaaaagtttgagctgctcccaactccacctctgtcccctagccggagatcgggactctgctcaccatcctacgtggccgtgactcctttttcgctgcggggtgataacgatgggggtggaggctcgttttcaactgccgaccagctggaaatggtgactgaactcctgggcggagacatggtgaatcagtccttcatatgtgatcccgacgacgagactttcatcaaaaacatcatcatccaggactgcatgtggtccggatttagcgccgccgcaaagctggtttccgagaagctggcctcgtaccaagcggcacgaaaggactcgggttcccccaacccggctcgtgggcattcagtctgttccaccagctccctgtacctgcaagatctgtccgcagccgcaagcgagtgcattgatccatcggttgtgttcccataccccctcaacgactcttcttcccctaaatcatgtgcatcccaagactcatccgccttttcaccgtcgtctgatagcctcctgtcatcgacggaatcctcgccccagggttcccctgaaccgcttgtccttcacgaagagactccgccaaccacctcctcggattcggaggaagagcaagaggatgaggaagagatagacgtggtttcggtggaaaagcgccaagcacccggaaagaggtcggaatcaggatcgccctccgctgggggtcattcgaagcctccacactccccactcgtcttgaagcgatgtcatgtgagcacccatcagcataactacgcggccccaccgtccacccgaaaagattatccagcagccaaaagagtgaagctggattcggtcagggtgttgagacagattagcaacaaccgcaaatgtacctctccccgtagcagtgataccgaggaaaacgtgaagcggagaacgcataatgtgcttgaacggcaacgcaggaatgaactgaagcggagcttcttcgctctcagagatcagattcctgagttggagaataacgaaaaggcccctaaggtggtcatcctgaagaaggcgaccgcttacatcctctcggtacaagctgaagaacagaagctgatatcggaggaggaccttcttcgtaagcgacgagagcagcttaaacacaagctcgagcaactgcggaactcctgtgca

SEQ ID NO: 21190 - DNA, 1317 bp, synthetic construct; identical to SEQ ID NO: 21189
  misc_feature 1..1317: note = source = /note="Description of Artificial Sequence: Synthetic coding sequence"
  source 1..1317: mol_type = other DNA

SEQ ID NO: 21191 - DNA, 1317 bp, synthetic construct
  misc_feature 1..1317: note = source = /note="Description of Artificial Sequence: Synthetic coding sequence"
  source 1..1317: mol_type = other DNA
atgcctctgaacgtaagtttcaccaataggaactatgatttggactacgattccgtgcagccttacttttattgcgatgaagaagagaatttttaccagcagcaacaacagagtgaattacaaccaccggctccatctgaggatatttggaagaagttcgagcttcttcctactccccctttgagtccatccaggcggagcggtctttgctctccctcttatgttgctgttacgccattttcccttaggggggataatgatggtggaggagggagtttctcaactgcagatcaactcgaaatggttacagaattattggggggagacatggttaatcaaagctttatttgtgatccagatgatgagacctttataaaaaacattattattcaagattgtatgtggtcagggttctctgctgctgctaagctcgttagcgagaagctggcgtcctatcaagctgctcgcaaggattcgggctcccctaaccctgctcgcggtcacagcgtctgtagtacatcttcactataccttcaggatctgtcagctgctgcatcagagtgtatcgatccgtccgtggttttcccctaccctctgaacgattcatcctcaccgaagtcctgtgcatcccaagattcctctgctttttctccatccagtgatagcttgctttcttctaccgagtccagcccacaaggctcacctgaaccattggttctccatgaagagacaccacctacaactagttctgattccgaagaggagcaggaggacgaagaggagatcgatgttgtttccgttgaaaagcgtcaggctccaggtaagagaagcgagagcggttcccctagtgctggtggccattcaaaacctccacattcccctctcgttttgaagcgatgccatgttagcactcaccagcataattacgcagctcctccatcgacacgtaaggattacccagctgcaaagagggtcaagttggatagtgtgagagtcttgaggcaaatttctaataaccgtaagtgtacttccccacgtagttcagataccgaagaaaacgtaaagagaaggacacataacgtgttggaaaggcagcgacgaaatgagttgaaaaggagcttcttcgcccttagggatcaaattcctgagctcgagaataatgaaaaggccccaaaagtggtcattttaaagaaggcgactgcttacattctctcagtacaggcagaggaacaaaaacttatatcggaagaggatctcctccgaaaaaggcgagaacaattgaagcataaactcgagcaacttcgtaattcatgcgca

SEQ ID NO: 21192 - DNA, 1317 bp, synthetic construct; identical to SEQ ID NO: 21191
  misc_feature 1..1317: note = source = /note="Description of Artificial Sequence: Synthetic coding sequence"
  source 1..1317: mol_type = other DNA

SEQ ID NO: 21193 - DNA, 1317 bp, synthetic construct
  misc_feature 1..1317: note = source = /note="Description of Artificial Sequence: Synthetic coding sequence"
  source 1..1317: mol_type = other DNA
atgccactgaacgtgagctttaccaaccgcaattacgacctcgactatgactctgtccagccatacttttattgtgatgaggaggagaatttttaccagcaacaacaacagtctgagctgcagcctcctgctcccagcgaggatatctggaaaaagttcgaactgctgcctactccccccctgtctccgagccgccgcagcggcctgtgttcacctagctatgtggccgttactcctttctctctgcgaggcgataacgatggtgggggtggttctttttcgacggctgaccagctggaaatggtgacggagttattggggggtgacatggttaaccagagcttcatttgcgatccggatgatgaaaccttcatcaagaatattatcatccaggattgtatgtggagcgggttctctgctgcggccaagctggtatcagaaaaactggcgagctaccaagcagcgcgcaaggattccggttcgccgaacccggcccgtgggcacagcgtgtgtagcacgagctcactgtacctgcaagatctgtcagccgcagccagcgagtgtatcgatccgagcgtggtttttccatatcctctgaatgacagtagcagcccgaagtcctgtgcgagccaggattctagcgctttttctccgagcagcgattccttgttgtctagcactgaatcatcaccgcagggctctcctgagccgctggtcctacacgaagagacccctcctaccacgtcttcggatagcgaggaagagcaggaagacgaggaggaaatcgatgttgttagcgtggagaagcggcaggcgcccggaaagcgctccgagtcaggcagcccaagcgctggcggtcattctaaacccccgcactctccactggttctgaagcgctgccatgtgtccacccaccaacacaactatgccgctcctccgtccactcgcaaggattatcccgccgctaaacgagttaaactggatagcgtgcgggtcctgcgtcaaatctctaataatcgcaagtgtaccagcccacgcagcagcgacacggaggagaacgtgaaaagaaggacgcataacgttcttgaacgtcaacggcgcaatgaattaaaaagatccttcttcgcgctgcgggatcaaattccggagttggagaacaatgagaaagcaccaaaggtcgttatcttgaagaaggccacggcatacattctcagcgtgcaagctgaggaacagaagctgatctccgaagaggatctcctgcgcaaacgacgcgaacagctcaaacataagctggaacaattacgaaattcttgcgcc

SEQ ID NO: 21194 - DNA, 1317 bp, synthetic construct; identical to SEQ ID NO: 21193
  misc_feature 1..1317: note = source = /note="Description of Artificial Sequence: Synthetic coding sequence"
  source 1..1317: mol_type = other DNA

SEQ ID NO: 21195 - DNA, 1317 bp, synthetic construct
  misc_feature 1..1317: note = source = /note="Description of Artificial Sequence: Synthetic coding sequence"
  source 1..1317: mol_type = other DNA
atgcccttgaatgtgtcgttcacgaacagaaactacgacctcgattacgattcggtgcaaccatacttctattgcgacgaagaagaaaacttctaccaacagcagcagcaaagcgagctgcagccgcctgccccaagcgaggacatctggaagaagttcgaactccttcctactcctcccctgtcccccagccggcgcagcggactctgctcgccctcctacgtggcagtcactccgttttcactgagaggagataatgacggagggggcggctcattttccactgccgaccagttggagatggtcaccgaacttttgggtggtgacatggtgaatcagtccttcatctgcgaccctgatgacgaaaccttcatcaaaaacatcatcatccaggactgtatgtggagcgggttctccgcggccgcgaagctcgtctccgaaaagctggcctcgtaccaggctgccaggaaggactcaggaagccctaacccggcccgcggacactccgtgtgctcgacttcatccctgtacctccaggatctgtcagcagccgcaagcgaatgcatcgatccaagcgtcgtctttccttacccactcaacgattcaagctctccaaagtcctgtgccagccaggactcgtcagccttctcgccgtcatccgatagccttctttcctccacggaatccagcccgcagggatccccggaaccgctggtgctccatgaggagactccgccaactacctcctcggatagcgaggaggaacaggaggacgaagaggagatcgacgtggtgagcgtcgagaaacggcaggcgcctggcaaacgatcggaatccgggtccccttcagccggtggacacagcaagcctccgcacagcccactggtcctcaagcggtgccacgtgtccacccatcaacacaattacgcggctcccccgtcgaccagaaaagactaccctgctgcaaagcgcgtcaagctcgatagcgtgagggtgctcagacagatctcgaataaccgcaaatgtaccagcccgcggtccagcgataccgaggaaaatgtgaagcgccggactcacaatgtcctggagagacagaggcggaatgagctgaaaaggtcgttcttcgccttgcgcgaccaaataccagaacttgagaataacgagaaagcgccaaaggtcgtgatcctgaaaaaggcgaccgcgtacatcttgtctgtccaggccgaggaacagaagctgatctcggaagaagatttgctgcggaagagacgggagcaacttaagcacaagctggaacaactgcgcaattcatgcgct

SEQ ID NO: 21196 - DNA, 1317 bp, synthetic construct; identical to SEQ ID NO: 21195
  misc_feature 1..1317: note = source = /note="Description of Artificial Sequence: Synthetic coding sequence"
  source 1..1317: mol_type = other DNA

SEQ ID NO: 21197 - DNA, 1317 bp, synthetic construct
  misc_feature 1..1317: note = source = /note="Description of Artificial Sequence: Synthetic coding sequence"
  source 1..1317: mol_type = other DNA
atgcctttgaatgtgtcattcactaacagaaactacgatcttgattacgattctgtgcaaccttacttttactgcgacgaagaagaaaacttctaccagcagcaacagcagtccgaactgcaaccgccagccccctccgaggatatctggaaaaagttcgagctgctgccgactccacccctcagcccgtcgcggcgctcgggattgtgctcgcccagctacgtggccgtgactccgttctccctgcgcggagacaatgacggtggaggagggtcgttttccaccgctgatcaactggagatggtgacggagctcctcggaggcgacatggtcaatcagagcttcatatgtgacccagacgatgagacttttatcaaaaacatcatcattcaagattgcatgtggtcgggattttccgcagcggcgaagctcgttagcgaaaagctcgcatcctatcaagccgccagaaaggactccggatcacctaacccggcgcgcggacactcggtctgcagcacttcttccctctacttgcaagacctgtccgcagcagcttcggaatgcatcgacccgtccgtggtgttcccttaccctctgaatgactcttcctcaccaaaatcgtgcgcgtcccaggactcttcggcattctcgccgtcaagcgatagcctgctctcgtccaccgaaagctccccgcaaggctcgccggagccgctggtcctccacgaggaaaccccacctactacttcgtcagactccgaggaagaacaggaagatgaggaagaaattgacgtcgtgtcagtggagaagcggcaggcccctggtaaacgatccgaatcggggagcccatcggctggcggacactcaaaacctccgcattcaccgctcgttctgaaacgctgccacgtctccactcatcagcacaattatgcggcgccaccgtccacccggaaggattacccggctgcaaagcgggtgaagctcgattcagtccgcgtccttaggcagatttcgaacaaccgaaagtgtacctcccctcggagctcagacaccgaagagaacgtgaagaggcgcactcacaacgtgcttgagcgccagcggagaaacgaactgaagcgctccttcttcgcgttgagggaccagattcctgagttggaaaacaacgaaaaggccccgaaagtggtcatcctcaagaaagccaccgcttacatcttgagcgtgcaggccgaggagcaaaagctgatctctgaggaagatttgctcaggaaaagaagggaacaactgaaacataagctcgaacagttgcgtaatagctgcgct

SEQ ID NO: 21198 - DNA, 1317 bp, synthetic construct; identical to SEQ ID NO: 21197
  misc_feature 1..1317: note = source = /note="Description of Artificial Sequence: Synthetic coding sequence"
  source 1..1317: mol_type = other DNA

SEQ ID NO: 21199 - DNA, 1317 bp, synthetic construct
  misc_feature 1..1317: note = source = /note="Description of Artificial Sequence: Synthetic coding sequence"
  source 1..1317: mol_type = other DNA
atgccactgaatgtgtcattcacgaatcgcaactacgatttggattacgacagcgttcagccctatttttactgcgacgaagaggaaaatttctatcagcagcaacaacagagcgagctgcaacctccggctccgagtgaggacatctggaaaaaattcgaattgctacccacaccccccctgtctccctcacgaagaagcggtctgtgttccccatcctatgtggccgtaaccccctttagtctgcggggagataacgatgggggcggagggtcgttctccacagcggaccaactggagatggtgactgagctcctaggcggcgacatggtgaatcagtccttcatctgtgacccagacgatgagactttcatcaagaatatcataattcaggattgtatgtggagtggctttagcgccgctgccaaactggtgtcagagaaattggcctcctaccaggctgctcggaaagatagcgggtccccaaatccagctcgtggccattcagtatgctcgacctctagtctctacctccaggacctgtctgcggctgcctctgaatgcatagacccctccgtggttttcccataccccctgaacgactcgtcatcacctaagtcttgcgcttcacaggactcatccgcatttagtccatcatctgactcactgttgagcagcacagagagcagtcctcaggggagtcctgagcctttggtgcttcacgaggagacgccacccactactagctccgatagtgaggaggaacaggaagacgaggaagagatcgacgtggtgagcgtggaaaagcggcaggcacccgggaagagaagcgagtccggtagcccatctgcagggggccattctaagccccctcattctcctctggtcttgaagcgctgtcacgtttccacgcatcagcataactacgcagcacctccgagcactagaaaagattaccctgctgcaaagcgcgttaaacttgacagtgttagggtcctaaggcagatttccaataataggaaatgcacgagccccagaagcagcgacactgaagaaaacgttaagaggaggactcataatgtgttggagaggcagagacgaaacgagctgaaacgtagcttcttcgctcttagggaccaaataccagagctcgaaaacaatgaaaaagccccaaaggttgtgatcttaaagaaggccacggcctatatattgagcgttcaagcagaagaacagaagctgataagcgaggaggacctgcttagaaaacgccgtgaacagcttaagcataaactggagcagctccgcaactcatgcgct

SEQ ID NO: 21200 - DNA, 1317 bp, synthetic construct; identical to SEQ ID NO: 21199
  misc_feature 1..1317: note = source = /note="Description of Artificial Sequence: Synthetic coding sequence"
  source 1..1317: mol_type = other DNA

SEQ ID NO: 21201 - DNA, 1317 bp, synthetic construct
  misc_feature 1..1317: note = source = /note="Description of Artificial Sequence: Synthetic coding sequence"
  source 1..1317: mol_type = other DNA
atgcccctgaacgtaagttttacaaaccggaattatgatttagactatgactctgtgcagccctacttctattgtgacgaggaggagaatttctaccaacagcagcagcagagcgagctccaacctcccgcgcccagcgaagacatttggaaaaaattcgaattgctgcctactccaccactttctccatcaagacggtcaggcctgtgctccccctcatacgtggccgtgaccccttttagtctgcgtggggacaacgacggcggtggcgggagcttctcaacagcggatcagttagagatggtaacagagttgttgggcggagacatggtgaatcaaagttttatatgcgatcctgacgatgagacatttatcaaaaacatcattatacaggactgcatgtggtcagggttctctgccgcagcaaaactcgtgagcgaaaaattggcaagctaccaagcagcccggaaggatagtggatcccctaatccggccagaggccattctgtgtgttcaacctctagcttatatcttcaagatctcagcgccgccgcctcagagtgcatcgaccctagtgtggtcttcccctatccgttgaacgattcatcctctcccaagtcatgcgcctcgcaggattctagcgccttctctcctagcagtgattccttattatctagcacggaatcatctcctcaggggagcccggagcccctggtgctccacgaagagacacctcccacgacctcatccgatagcgaggaggagcaggaggatgaggaagagatcgacgtcgtctctgtggagaagagacaagccccaggcaagcggtctgaaagcggcagcccctcagcgggcgggcattcaaaacccccacactcaccattggtcctcaagagatgtcatgtcagtacacaccagcacaactatgcagctccaccctcgacaaggaaagactatccagctgccaaaagggtgaaactggattctgtccgggtactgcggcagatttctaataacaggaaatgcactagccctaggtcctctgacacggaggagaacgtcaagaggagaactcacaacgtgctggaacgacagagaaggaatgagcttaagagatcctttttcgcactgagggaccagataccagaactcgagaataacgagaaagcacctaaggtggtgatcttgaagaaagcaactgcttacattctttctgtccaggcagaagagcagaagctgatcagcgaggaggatctgctgcggaaaagacgcgagcagctgaaacacaaactagagcagttgcgcaatagctgcgcc

SEQ ID NO: 21202 - DNA, 1317 bp, synthetic construct; identical to SEQ ID NO: 21201
  misc_feature 1..1317: note = source = /note="Description of Artificial Sequence: Synthetic coding sequence"
  source 1..1317: mol_type = other DNA

SEQ ID NO: 21203 - DNA, 1317 bp, synthetic construct
  misc_feature 1..1317: note = source = /note="Description of Artificial Sequence: Synthetic coding sequence"
  source 1..1317: mol_type = other DNA
atgcctttgaacgtttctttcactaacagaaattacgatttggactacgattctgtacagccctatttctactgtgacgaagaagaaaatttctaccagcagcagcagcagtccgaactgcagcctccagctccatcggaagatatttggaaaaaattcgagctactgcccactccccctctgtcaccttcaaggagatccggactctgttcaccctcatatgtcgctgtgactcctttctctttacgcggggacaacgatggaggaggggggagtttctctacagctgatcagctcgaaatggtaactgaactgctcgggggggatatggtgaaccagtcctttatatgcgatcccgacgatgagacattcataaaaaacatcataattcaggactgtatgtggtccgggttttctgctgcagcaaaactggtctcagaaaaattagccagttatcaggctgcgagaaaagattctggaagtcccaatcccgccagggggcattcagtgtgttctacatcctcactttatctacaggatctaagtgctgcagcctccgaatgtattgaccctagtgtagtgttcccttaccctctaaacgatagttcctccccaaaatcttgtgcttcccaggattctagtgcattctcacctagtagtgatagtttattatcaagtactgaaagttcaccccaggggagtcccgaacccctggtgctacacgaagaaactcctccaacaactagttcagattctgaggaggaacaggaagacgaagaggaaatagatgtggtgtccgtcgagaaaaggcaggctcctgggaagcgctctgaatctgggtcaccctcagcaggaggacactccaaacccccacattcccctctggttctcaaacgatgtcatgtatctactcatcagcataattatgctgcccctccctcaacaagaaaagattacccagccgccaaaagggtgaaactcgactccgtgagagtcctgaggcagatatcaaataatcgaaaatgtacatcccccagatcctcggatacagaagaaaatgtcaaacgacgaactcataatgtgttggagaggcagcggagaaatgagctgaagcgctcatttttcgcactccgagatcagattcctgaactggaaaataacgagaaagcacctaaagttgttatcctcaaaaaagccacagcctacatattatcagtccaggccgaagaacagaaacttatctctgaagaagacctcttacgaaaacgaagggaacagctaaaacacaaactcgaacagctgagaaacagttgcgct

SEQ ID NO: 21204 - DNA, 1317 bp, synthetic construct; identical to SEQ ID NO: 21203
  misc_feature 1..1317: note = source = /note="Description of Artificial Sequence: Synthetic coding sequence"
  source 1..1317: mol_type = other DNA

SEQ ID NO: 21205 - DNA, 1317 bp, synthetic construct
  misc_feature 1..1317: note = source = /note="Description of Artificial Sequence: Synthetic coding sequence"
  source 1..1317: mol_type = other DNA
atgcctctgaatgtgagcttcaccaataggaactacgacctcgattacgattctgtccagccttacttttactgtgacgaggaagagaatttctaccagcaacaacaacaatctgagctgcagccccccgccccctcggaagatatttggaagaaattcgaacttcttcctacgcccccactgagccctagcagaagaagcgggctctgtagccctagctacgtggcagtcaccccgttttcccttcgcggggacaatgatggtggcggtggatcattttccaccgcagatcagctggaaatggtgaccgagcttcttggtggtgacatggtgaaccaatcattcatctgcgacccagatgatgaaaccttcattaagaatatcattattcaggattgtatgtggtcagggttttcagccgcagccaagctggtgagcgaaaaactggcatcataccaagcagcacgaaaagattcgggatcaccaaatcccgcgagaggacattccgtgtgctccacgagctccctctatcttcaggacttgtcggccgcagcgagtgagtgcatagacccttcggttgtgtttccataccctttgaacgattcgtcgagccctaaatcctgcgcgtcgcaggattcgtcagctttctctccttcatcggattcgctcctctccagcaccgaatcgtctccacaagggtcacccgaacctcttgtgctgcatgaagaaacccctcctaccacgtcctccgattccgaagaggaacaggaagatgaagaagaaatcgacgtggtgtcagtcgagaagcgccaagcacctggaaaaagatcggaaagcggatcgccttcggctgggggccattcaaaacctccacacagccccctcgtgctgaagcggtgtcacgtgtcaacccatcaacacaactatgcagcaccaccttcgacgagaaaagattaccccgccgcaaagagagtgaagctcgattcggtgagggtgctgaggcaaatttcgaacaacagaaaatgtacgtccccgagatcatcggatactgaggaaaacgtcaaacgccggactcataacgtgcttgagaggcaacgccgcaatgagctgaagcgatcattctttgcgctgagggaccagatccctgagcttgagaacaacgaaaaggcgcctaaggtcgtgattctgaagaaggctaccgcatatatcctgagcgtgcaggccgaagaacagaagctcatcagcgaggaagatctcctgaggaaacggagagaacagctgaagcacaaattggaacagcttcgaaattcatgtgca

SEQ ID NO: 21206 - DNA, 1317 bp, synthetic construct; identical to SEQ ID NO: 21205
  misc_feature 1..1317: note = source = /note="Description of Artificial Sequence: Synthetic coding sequence"
  source 1..1317: mol_type = other DNA

SEQ ID NO: 21207 - DNA, 1317 bp, synthetic construct
  misc_feature 1..1317: note = source = /note="Description of Artificial Sequence: Synthetic coding sequence"
  source 1..1317: mol_type = other DNA
atgcccctgaatgtctccttcaccaaccgtaactacgatctggattacgactccgtgcagccgtatttttattgcgacgaggaagagaacttttatcagcagcaacaacagagcgaattgcagccccccgctccctccgaggacatttggaagaagtttgagctgctgcccacccctccattgtccccctcgcggaggtcggggctgtgtagcccttcatacgtggcagtgactcctttctctttgaggggggataacgacggaggaggagggtcattctccaccgcggaccagttagaaatggtaaccgagttactgggcggtgacatggtcaaccagagcttcatctgcgacccggatgatgaaaccttcataaaaaatataatcattcaggactgtatgtggtctgggttctcggcggctgccaagctggtctctgaaaagctcgcaagctaccaggccgctagaaaggactccgggtcaccaaatccggctcggggccattcagtgtgctcgactagttccctgtacctgcaggacctgagcgccgccgcttctgagtgcatcgatcctagtgtggtttttccttaccccctgaacgacagcagcagccccaaatcatgtgctagccaggattcttcggccttttctccaagctccgattccttgctctcttctacggagtcttccccacaaggctctcccgagccactggtactgcacgaggaaaccccccccaccacctcgagcgactctgaagaagagcaggaagacgaagaagaaattgatgtggtgtccgtggagaagaggcaggcgccgggtaagcggtccgagtccggatccccatctgccggtggacattctaagccccctcattcacccctcgtactgaaacgttgccacgtgtcaacccaccagcataactatgcagcgcccccctccactaggaaggattatcctgcagctaaacgtgttaagttagatagcgttagggtactccgacagatttcgaataataggaaatgtacctccccacgatcatccgatacggaggagaatgttaagcgaaggacgcataatgttctggagaggcagagaagaaacgagctgaagagaagcttcttcgcactgcgtgatcagatcccggaactggagaataacgagaaggcacctaaagtcgtaatattaaaaaaggcaactgcatacatcctgtccgtgcaggccgaggaacagaagctcatcagtgaagaagacctgctacggaaaagacgagagcagctaaaacataagctggagcagctgagaaatagttgcgca

SEQ ID NO: 21208 - DNA, 1317 bp, synthetic construct; identical to SEQ ID NO: 21207
  misc_feature 1..1317: note = source = /note="Description of Artificial Sequence: Synthetic coding sequence"
  source 1..1317: mol_type = other DNA

SEQ ID NO: 21209 - DNA, 1317 bp, synthetic construct
  misc_feature 1..1317: note = source = /note="Description of Artificial Sequence: Synthetic coding sequence"
  source 1..1317: mol_type = other DNA
atgccgttaaatgtttcgtttacgaatcgtaattatgatttagattatgattcggttcaaccgtatttttattgtgatgaagaagaaaatttttatcaacaacaacaacaatcggaactacaaccgccggcgccgtcggaagatatatggaaaaaatttgaactattaccgacgccgccgctatcgccgtcgcgtcgatcgggtttatgttcgccgtcgtatgtagcggttacgccgttttcgttacgtggtgataatgatggtggtggtggttcgttttcgacggcggatcaattagaaatggttacggaactactaggtggtgatatggtaaatcaatcgtttatatgtgatccggatgatgaaacgtttataaaaaatataataatacaagattgtatgtggtcgggtttttcggcggcggcgaaattagtttcggaaaaactagcgtcgtatcaagcggcgcgaaaagattcgggttcgccgaatccggcgcgtggtcattcggtttgttcgacgtcgtcgctatatctacaagatttatcggcggcggcgtcggaatgtatagatccgtcggtagtatttccgtatccgctaaatgattcgtcgtcgccgaaatcgtgtgcgtcgcaagattcgtcggcgttttcgccgtcgtcggattcgttactatcgtcgacggaatcgtcgccgcaaggttcgccggaaccgctagtattacatgaagaaacgccgccgacgacgtcgtcggattcggaagaagaacaagaagatgaagaagaaatagatgtagtatcggttgaaaaacgacaagcgccgggtaaacgttcggaatcgggttcgccgtcggcgggtggtcattcgaaaccgccgcattcgccgttagtattaaaacgatgtcatgtatcgacgcatcaacataattatgcggcgccgccgtcgacgcgaaaagattatccggcggcgaaacgagtaaaattagattcggttcgtgttctacgacaaatatcgaataatcgaaaatgtacgtcgccgcgttcgtcggatacggaagaaaatgttaaacgacgtacgcataatgttctagaacgacaacgtcgaaatgaactaaaacgttcgttttttgcgttacgtgatcaaataccggaactagaaaataatgaaaaagcgccgaaagttgtaatattaaaaaaagcgacggcgtatatactatcggtacaagcggaagaacaaaaactaatatcggaagaagatctactacgaaaacgtcgagaacaattaaaacataaactagaacaactacgtaattcgtgtgcg

SEQ ID NO: 21210 - DNA, 1317 bp, synthetic construct; identical to SEQ ID NO: 21209
  misc_feature 1..1317: note = source = /note="Description of Artificial Sequence: Synthetic coding sequence"
  source 1..1317: mol_type = other DNA

SEQ ID NO: 21211 - DNA, 1317 bp, synthetic construct
  misc_feature 1..1317: note = source = /note="Description of Artificial Sequence: Synthetic coding sequence"
  source 1..1317: mol_type = other DNA
atgcctcttaacgtgagtttcacaaacaggaattatgatctcgattacgattctgtacagccctatttttattgcgatgaggaggagaatttctatcagcaacagcagcagtcggaactacagccaccagccccctccgaagatatttggaaaaaatttgaattactgccaactccacctcttagtccatcaagacgctctgggttatgcagtccatcctatgtagctgtgacaccattttctctcagaggggataacgatggaggaggagggtctttttccacagcagatcagctggaaatggtgactgaactgctaggaggagacatggtcaatcagtcttttatatgtgatcccgatgacgaaacattcatcaaaaacatcatcatacaggattgtatgtggtctggattttccgccgctgcaaaactagtctctgaaaaactggcaagttaccaggctgccaggaaagatagtggatccccaaatccagcgcgggggcattccgtttgttcaacttcttccctctatctccaggatctcagtgctgcagcatctgaatgtatcgatccctctgttgtcttcccttatccacttaatgatagttcctctccaaaatcttgtgcctcccaggatagttctgcattttccccttcttctgattctctactatccagtacagaatcgtcaccacaaggatcgccagaacctcttgttctccatgaggaaactcctccgactactagttccgattctgaagaggagcaggaggatgaggaagaaatcgatgtggtctctgtagagaagcgccaggcccccgggaaacggtctgaatctgggagtccatctgctggggggcattctaaaccccctcattctccactcgtgctcaaacgatgccatgtttctacacaccagcataattacgctgctcctccatccacaaggaaagactacccagccgctaaaagagtgaaactcgattctgtacgcgttttgaggcagataagtaacaatcggaagtgtacatctccacggtctagtgacactgaagaaaatgtgaaacggcggactcacaatgtccttgaaagacaacggaggaatgagttaaaacgctcgttttttgccctaagagatcagattcccgagctcgaaaataatgaaaaagcacctaaagtggtcatattgaaaaaagccacagcatatattctgagtgttcaggccgaagaacagaagcttataagtgaggaagacttgctcaggaaaaggcgagaacaactgaaacataaactcgagcaactaaggaactcctgtgct

SEQ ID NO: 21212 - DNA, 1317 bp, synthetic construct; identical to SEQ ID NO: 21211
  misc_feature 1..1317: note = source = /note="Description of Artificial Sequence: Synthetic coding sequence"
  source 1..1317: mol_type = other DNA

SEQ ID NO: 21213 - DNA, 1317 bp, synthetic construct
  misc_feature 1..1317: note = source = /note="Description of Artificial Sequence: Synthetic coding sequence"
  source 1..1317: mol_type = other DNA
atgccgctgaacgtcagctttaccaacagaaattacgacctcgactatgactcagtgcagccttacttctactgcgacgaggaggaaaatttttaccagcaacagcaacagtccgagctccaaccacccgcacccagtgaggacatatggaagaagtttgagctcctgcctacccctcccctctctccaagcagaagatctgggttgtgttcacccagttacgtggccgtgactccattttctctgcgcggagataacgatggtgggggcgggtccttttccaccgctgaccaactggagatggtcacagagttgctcggtggcgatatggttaatcagtccttcatctgcgaccccgacgatgaaaccttcatcaagaacatcataatccaggactgtatgtggtccggcttctctgcagctgcgaagctcgtgtctgagaaactggcttcataccaggctgctcgcaaggactccggctcaccaaatccagcgcggggtcactctgtatgctctaccagcagtttgtatttgcaagacctgtctgcagcggcaagtgagtgtatcgatccctccgtggttttcccatacccacttaatgacagcagcagcccgaagtcctgtgcctcccaggatagtagtgccttctctccatcttccgattctctcctgtccagtaccgagagctctcctcaaggcagccctgaacctttggtactgcatgaggagacaccaccaacaacttcatctgacagcgaagaggagcaggaggacgaggaagagatagacgtagtcagcgtggagaagaggcaggcaccgggtaagcgatctgagtccggttcaccgagcgccggcgggcatagcaaaccgccacacagcccccttgtgttgaagcggtgccacgtttccacgcaccagcataattatgccgcgccaccaagtacacggaaagattaccccgcagctaaaagggtgaagctcgatagtgtgcgggttctccggcagatctccaacaaccggaaatgcacaagcccccgctcaagtgacactgaggagaatgtaaagcgcaggacacacaacgtgctcgagcgccagagacggaatgaactgaagaggtctttctttgcgcttcgcgatcagattcctgagctggagaataatgaaaaggctccaaaggtcgtcatattgaagaaagctacagcctacatcctcagcgtccaggcagaagagcaaaagctgatcagtgaggaagaccttctgcgcaaacggcgcgaacagctcaagcacaagctggaacagctgcgcaatagctgcgca

SEQ ID NO: 21214 - DNA, 1317 bp, synthetic construct; identical to SEQ ID NO: 21213
  misc_feature 1..1317: note = source = /note="Description of Artificial Sequence: Synthetic coding sequence"
  source 1..1317: mol_type = other DNA

SEQ ID NO: 21215 - DNA, 1317 bp, synthetic construct
  misc_feature 1..1317: note = source = /note="Description of Artificial Sequence: Synthetic coding sequence"
  source 1..1317: mol_type = other DNA
atgccgctcaacgtgtctttcactaatagaaactacgatcttgattacgactccgtgcagccatacttttactgtgatgaggaagagaacttttatcaacagcagcagcaaagcgaactccagcctcctgccccatccgaagatatctggaagaaatttgaattgctgcctacgccacctctctcaccctccagacgcagcggcctgtgtagccccagctatgtggcagtcactccattctcgttgcggggggataacgatggaggtggcggttccttttcgaccgcagaccagttggagatggttaccgagctgctgggaggagacatggtgaaccaatcgtttatctgcgatccggatgacgaaaccttcatcaagaatatcatcatccaggattgtatgtggtcggggttcagcgcagccgctaaacttgtgtcagaaaagctggcatcatatcaagccgcaagaaaggattcgggaagcccaaacccagcacgcgggcattcggtgtgctcaacctcgtctctttatcttcaagatctctcggcggcagcctcggaatgtattgatccgtccgtggtgtttccgtaccctctgaacgattccagcagccctaagtcatgcgcatcgcaagattcctcggccttctccccctcatcggactcacttctttcctcgaccgagtcctctccccaaggatccccagaaccactggtcctgcacgaagaaaccccacctactacctcgtcagattcagaagaggagcaagaggacgaagaggaaatcgatgtggtgtcagtggaaaagcggcaagcaccagggaagagatcggagtcgggttcaccatcggctggaggccatagcaaacctcctcattcgcctttggtcctgaagcgctgtcacgttagcacgcatcaacacaattacgcagctcctccctcgactcgaaaagattaccctgccgcgaaaagagtgaaactcgactccgtgcgcgtgctcaggcaaatttcaaacaacaggaaatgcacttcaccccgttcgagcgataccgaagaaaatgtgaaaagaaggacccacaacgtgctggaacggcagcggagaaacgaacttaagcgctcatttttcgcccttcgagatcagattcccgaacttgagaataatgagaaagcaccaaaggtcgttatactcaagaaggctactgcatacattctgtcggtccaggcagaagaacagaagctgattagcgaagaggatctcctccgtaagcggagagaacaacttaaacacaagctcgagcaactcagaaattcatgtgcc

SEQ ID NO: 21216 - DNA, 1317 bp, synthetic construct; identical to SEQ ID NO: 21215
  misc_feature 1..1317: note = source = /note="Description of Artificial Sequence: Synthetic coding sequence"
  source 1..1317: mol_type = other DNA

SEQ ID NO: 21217 - DNA, 1317 bp, synthetic construct
  misc_feature 1..1317: note = source = /note="Description of Artificial Sequence: Synthetic coding sequence"
  source 1..1317: mol_type = other DNA
atgccactgaatgtgtcgttcactaacagaaactacgaccttgactacgattccgtccaaccttacttttactgcgacgaggaagaaaacttttaccaacagcagcaacagagtgaattgcagcctccggctcctagcgaggatatttggaagaaattcgaactgttgccaaccccgccgctgagtccaagcagacgctcgggactgtgctccccgtcgtacgttgccgtgaccccgttctccctgcgcggggataacgacggaggcggaggatccttctcgaccgcggatcaactggagatggtaactgaactcctgggtggggatatggtgaaccagagcttcatttgcgacccggatgacgagactttcatcaagaacatcattatccaggactgtatgtggagtggattctcggccgcggctaagctggtatctgaaaaactggcctcgtaccaagccgcaagaaaggattcggggagcccgaacccagcgcgcgggcattcagtgtgctccaccagctcactgtacctgcaagacttgtccgctgctgcgtctgaatgcatcgatccatcagtggtgttcccgtacccgcttaacgactcatcttcaccgaagtcttgtgcatcgcaggacagcagcgcattcagcccgtctagcgactcgctgctgtcaagcaccgagagctccccgcaggggtcgccagaacccttggtgcttcatgaagaaacgccgccgacgacttcatcagactcagaagaggaacaggaggatgaggaagagatcgatgtggtttcggtcgaaaagcgccaggcgccagggaagcgctcggagagcggatccccctcggcaggaggccactcgaagccgcctcactccccgctcgtgctcaaacgctgccacgtctcaacccaccaacacaattatgccgccccgccatcgacccgcaaagattaccccgcagccaagcgggtgaagctcgacagcgtgcgcgtgcttcgccaaatcagcaataatcggaagtgtacttcgccaaggtcgtcggacaccgaggaaaatgtgaagcggagaactcacaatgtgctcgagcgtcagcggcgcaatgaactgaaaagatctttctttgccctcagagatcagatcccggagctggaaaacaacgaaaaggccccgaaggtggtgatcctgaaaaaggcgaccgcttacatcctgagcgtgcaagcggaagagcagaagttgatctcggaggaggacctcctgcggaagagaagggagcaactcaagcataagctggagcagctccggaactcatgcgcg

SEQ ID NO: 21218 - DNA, 1317 bp, synthetic construct; identical to SEQ ID NO: 21217
  misc_feature 1..1317: note = source = /note="Description of Artificial Sequence: Synthetic coding sequence"
  source 1..1317: mol_type = other DNA

SEQ ID NO: 21219 - DNA, 1317 bp, synthetic construct
  misc_feature 1..1317: note = source = /note="Description of Artificial Sequence: Synthetic coding sequence"
  source 1..1317: mol_type = other DNA
atgcctctgaacgtgtcgtttactaatagaaactatgaccttgactacgacagcgtccaaccgtacttctactgcgacgaagaagagaacttctaccagcagcaacagcaatccgaactgcagccaccagcgccctcagaagatatctggaagaaatttgagctgctgccgaccccgcctctgtcaccctccagacgatctggactgtgttcgccttcctacgtggccgtcaccccgttctcgctgagaggcgacaacgacggaggcggcgggtcgttcagcaccgctgaccagctcgagatggtcacggagttgctcggaggagacatggtgaatcagtcatttatctgcgacccggatgacgaaactttcattaagaacattatcatccaagattgcatgtggtcggggttcagcgcggccgccaagctggtgtcagaaaagttggcgagctaccaggcagcccggaaagacagcggatcgccgaacccggcgaggggccatagcgtctgctcaacttcatcgctctacctgcaagacctcagcgcagctgcctcggagtgcatcgacccttccgtggttttcccctacccgctgaacgattcctccagcccgaaatcctgcgccagccaggacagctccgcattttccccgtcgtccgatagcctcctgtcctcaaccgaatcgtcgccacagggatcgccagaacctctggtgctgcatgaggaaactccaccgaccacgtccagtgattcggaggaagagcaggaagatgaggaggaaatcgatgtcgtgagcgtcgagaagagacaggccccgggaaagcggtccgagtccggtagtccatcagcgggtggacattcaaagcctccacattccccactcgtgctcaaacggtgccacgtgtccactcaccaacacaattacgccgctccgccatcgacccgtaaggactaccccgcagcgaagcgcgttaagctggattcggtgcgggtgctccggcaaatttcgaacaatcggaagtgtacttcgccccgctcctcagataccgaagagaatgtgaaacgcaggactcacaacgtgctggaacgccagcgccgcaacgagcttaagagatcattcttcgctttgcgcgaccaaatcccggagctcgaaaacaatgaaaaagcacctaaggtcgtgatcctcaagaaagccaccgcctacatccttagcgtgcaggccgaagaacaaaaactgatcagcgaggaagatctgctgcgaaagcgcagggaacagctgaagcacaagttggagcagcttcggaattcttgtgct

SEQ ID NO: 21220 - DNA, 1317 bp, synthetic construct; identical to SEQ ID NO: 21219
  misc_feature 1..1317: note = source = /note="Description of Artificial Sequence: Synthetic coding sequence"
  source 1..1317: mol_type = other DNA

SEQ ID NO: 21221 - DNA, 1317 bp, synthetic construct
  misc_feature 1..1317: note = source = /note="Description of Artificial Sequence: Synthetic coding sequence"
  source 1..1317: mol_type = other DNA
atgccactgaacgtttcgttcactaatcggaactacgacctggattacgattccgtccaaccgtacttttactgtgatgaggaggaaaacttctaccaacagcagcagcagtccgagctccagccgcccgccccgagcgaggacatctggaagaaattcgaactgttgccaaccccacctctttcaccgtcgcggcgctcgggcttgtgctcgccttcttacgtggccgtcactccgttctcgctgcggggcgacaacgatggtggtggtggttccttttcaaccgccgaccagctcgaaatggtgactgagctgctcggaggagatatggtcaatcaatcgttcatttgcgatccggacgacgagactttcatcaagaacattatcattcaagactgcatgtggtccggattttccgcggccgcgaaactggtgagcgagaaactggcgtcctaccaggcggcaagaaaggactccggatccccgaatccggcaaggggacactccgtgtgtagcacttcatccttgtacctgcaggacctgagcgccgcggcaagtgaatgcattgacccatctgtggtctttccgtaccctctgaacgactcctcgagcccaaaaagctgtgcctcccaggattcatcggctttctcaccgtcatcggactcccttctgtcctccaccgaaagctcaccgcagggatcccccgagccactcgtgctccatgaggaaactccgcctacgaccagcagcgactcggaagaagagcaggaggacgaggaagaaatcgacgtggtgtccgtcgaaaagaggcaggccccgggtaagagatcggagtctggctcaccgagcgctggaggccatagcaagccgccacacagcccactggtgctcaagcgctgccacgtgtcgactcaccagcacaattacgccgccccacctagcactcggaaggactacccggcagccaaacgggtcaaactggattcggtcagggtgctgcggcagatctctaacaatcgcaaatgcacctccccgcggtcgagcgatactgaagaaaacgtgaagcgccgcactcacaacgtcctggagcgccagcggcgcaacgaactgaagcgcagctttttcgctctgcgcgaccagatcccggagctggaaaacaatgaaaaggcaccaaaagtcgtgatccttaagaaggccactgcttacattttgtccgtgcaggcggaggaacagaagctgatcagcgaagaggaccttctgcgcaagcgccgagagcaacttaagcacaagttggagcagctgcgcaactcgtgcgcg

SEQ ID NO: 21222 - DNA, 1317 bp, synthetic construct; identical to SEQ ID NO: 21221
  misc_feature 1..1317: note = source = /note="Description of Artificial Sequence: Synthetic coding sequence"
  source 1..1317: mol_type = other DNA

SEQ ID NO: 21223 - DNA, 1317 bp, synthetic construct
  misc_feature 1..1317: note = source = /note="Description of Artificial Sequence: Synthetic coding sequence"
  source 1..1317: mol_type = other DNA
atgcccctgaacgtctcttttacgaataggaactatgacctggactatgattctgtgcagccttacttctactgtgacgaggaagaaaatttttaccagcagcagcaacagtcagaactccagccccctgctccttctgaagatatctggaaaaagttcgaactgctgcctaccccgccgctgtcgccatctcgacgcagcggtctgtgttcacccagctatgtcgccgtgacccctttcagtctgaggggagataatgacgggggcggcgggtctttttccactgcggaccagctggaaatggttactgaactgctgggcggcgacatggtgaaccagagcttcatctgcgaccccgacgacgagacatttataaagaacattattatacaagattgtatgtggtccgggttctccgccgcggcgaagctggtgtcagaaaaactggcctcctaccaagctgctaggaaggacagcggctctccaaacccagctagaggtcactccgtgtgctcgacctcatctctgtacctgcaggatctctccgcggccgcaagtgaatgcattgatcccagtgtggtgttcccctatcccctcaacgacagcagctcacctaaaagttgcgccagccaagattcctcagcgtttagtccttcctccgacagcctactttcatccactgagagcagtcctcagggttcaccagaacccctcgtgctccatgaggaaaccccccccactacaagttctgattccgaggaagagcaggaggatgaagaggaaattgatgtggtgtctgtggagaagcgtcaggcacccgggaaaaggagtgagtcaggaagtccatctgccggcggccatagcaagcctccccacagtcctttagtcctgaagcgatgccatgtgtctacacaccagcacaattacgctgctccacctagcactagaaaggattatcccgctgccaagcgcgtcaagctagattctgtgagggtgctgaggcagatttcaaataacagaaaatgcacaagccccaggtcatccgacaccgaagaaaacgtcaaacggcgcacacataatgtcctggagaggcagcgacgtaatgagttgaaaagaagcttctttgccctgcgtgaccaaatcccagaactggagaataacgagaaggctccaaaagtcgtgatcctgaaaaaggccaccgcttacatcctgagcgtccaggcggaagagcagaagctgatctcagaggaggatttgttgcgaaagcgaagggagcaattaaaacataaactagaacagttgcgaaacagctgcgca

SEQ ID NO: 21224 - DNA, 1317 bp, synthetic construct; identical to SEQ ID NO: 21223
  misc_feature 1..1317: note = source = /note="Description of Artificial Sequence: Synthetic coding sequence"
  source 1..1317: mol_type = other DNA

SEQ ID NO: 21225 - DNA, 1317 bp, synthetic construct
  misc_feature 1..1317: note = source = /note="Description of Artificial Sequence: Synthetic coding sequence"
  source 1..1317: mol_type = other DNA
atgcccctcaatgtcagcttcactaatcgcaattacgatctggattacgactcggtgcagccttacttttactgcgatgaagaagaaaacttctatcaacagcagcaacagtccgaactgcagccgccggccccatcagaggacatctggaaaaagtttgaactcctgccgactccacccctgtcgccctcacggcggagcgggctgtgctccccatcctacgtggccgtcactcctttctcgttgcgcggagacaatgatgggggaggcggatcattctcgacggcagatcagctggaaatggttaccgagctgctgggcggtgatatggtgaaccagtcctttatctgcgatcctgacgacgaaaccttcattaagaacataatcatccaagactgcatgtggagcggattctccgcagcggcaaagctcgtgagtgaaaagctggcgtcgtaccaagccgcccggaaggactccggaagcccgaacccagcacggggacattcagtgtgtagcaccagttcattgtatcttcaagacctctccgccgccgcgtcggagtgcattgacccatccgtggttttcccataccctcttaacgactcatccagccccaaatcctgtgcctcccaagactcctcagctttctcgcctagtagcgatagcttgctgtcgagtacggaatcgtccccacagggatcaccagaaccgctggtgctccacgaggaaactccaccgaccacctcttcggattcggaagaagagcaggaggatgaagaggagatagacgtcgtcagcgtcgagaaaagacaggcacccgggaaacgcagcgagtcgggctccccgtctgccggtggccacagcaagccaccgcattccccgctggtgctgaaacggtgccatgtgagcactcaccagcacaattacgccgcgcctccgtccactcgcaaggactaccctgcagctaagcgagtcaagctcgattccgtgcgggtgcttcgccagatctctaacaatcggaaatgcacttccccacgcagcagcgacactgaagagaatgtgaaacgcagaacccataacgtgcttgagcggcagcgccggaacgaactcaagagatcgtttttcgccctccgcgaccagatccctgaacttgaaaacaacgagaaagccccgaaggtggtgatcctgaagaaggcgaccgcctacatcctctccgtccaggcggaggagcagaaactgatctcggaggaggatctcctgcgcaagaggcgcgagcaactgaaacacaagctggagcaactgcggaacagctgtgcc

SEQ ID NO: 21226 - DNA, 1317 bp, synthetic construct; identical to SEQ ID NO: 21225
  misc_feature 1..1317: note = source = /note="Description of Artificial Sequence: Synthetic coding sequence"
  source 1..1317: mol_type = other DNA

SEQ ID NO: 21227 - DNA, 1317 bp, synthetic construct
  misc_feature 1..1317: note = source = /note="Description of Artificial Sequence: Synthetic coding sequence"
  source 1..1317: mol_type = other DNA
atgccactcaacgtgtcgttcaccaatcgcaactacgatcttgattacgattccgtgcaaccttacttttactgtgacgaggaggagaacttttaccaacaacagcaacagtcagaattgcagcctccggcaccttcagaagatatttggaagaagtttgaactccttcccactcccccactgtccccatcaagaagatccggactttgttcgcctagctacgtggcagtgacccctttcagcctgagaggagacaacgatggaggcgggggtagcttttctactgcagatcaacttgaaatggtgaccgagcttctcggaggagatatggtcaaccagtcatttatctgtgatccagatgacgaaactttcataaagaacatcattattcaagattgtatgtggagcggtttctcggcagctgcgaagctggtgtccgagaaactcgcatcgtatcaagcagcgcgcaaggatagtggtagccccaaccctgcacgcggacactccgtgtgttcaacctcgtcactgtaccttcaggatctgagcgcagctgcctcggaatgtatcgatccttccgttgtgtttccttaccccctcaacgactcatcctcgccgaagagctgtgcatcccaagattcgtccgcgttctcgccctcatcggattcccttctgtcatcaactgagagttcccctcaagggtcacccgaacccctggtgctgcacgaggaaactcctccaactactagctcagattcggaggaggagcaagaggacgaagaagaaatcgacgtggtgtcagtggaaaagagacaggcaccaggtaagcgctcagaaagcggatccccttcggccggaggacactccaaaccgcctcattccccgcttgtgctgaaacggtgccatgtgtccactcaccaacacaattacgcagctccaccttcgacccgtaaggattaccctgcagcaaaacgcgttaagctggattccgtccgagtgcttcggcaaattagcaacaatcgaaaatgtaccagcccgcgctcgtccgataccgaggagaatgtgaaaaggaggactcataatgtgcttgagagacagcgcagaaatgagctgaagcggtcattcttcgcactgcgtgatcagattcctgaactggaaaacaacgagaaggcgccaaaggtcgtgatcctgaagaaggcaaccgcctacattctctcagtgcaggccgaagaacaaaagttgatttcggaagaagatcttttgaggaaaagaagggaacagcttaaacacaagctcgaacagcttcgaaacagctgtgca

SEQ ID NO: 21228 - DNA, 1317 bp, synthetic construct; identical to SEQ ID NO: 21227
  misc_feature 1..1317: note = source = /note="Description of Artificial Sequence: Synthetic coding sequence"
  source 1..1317: mol_type = other DNA

SEQ ID NO: 21229 - DNA, 1317 bp, synthetic construct
  misc_feature 1..1317: note = source = /note="Description of Artificial Sequence: Synthetic coding sequence"
  source 1..1317: mol_type = other DNA
atgccactaaacgtctcctttacaaataggaactacgacctcgattatgattcagtgcaaccgtacttttattgcgatgaggaggaaaatttttaccaacagcagcagcaatccgagctgcagccccctgccccatccgaggatatctggaagaaatttgagctcctgcctacaccgccactgtcccccagtaggcgctctgggttatgctctccatcttatgtcgccgtcactcctttttcacttagaggcgacaacgatggcggtgggggttctttttcaaccgcggatcagcttgaaatggtcaccgaattattgggcggggacatggttaaccaatctttcatctgcgaccctgacgacgagaccttcataaaaaatattatcatccaggattgtatgtggagcggcttctcagcagccgccaaactggtgtcagaaaagcttgcctcttaccaagctgcgagaaaggattcgggaagtcccaatcccgcacggggtcactccgtatgttccacttcatctctgtatctacaggatttgagcgctgcggcttccgagtgcatcgaccccagtgtcgtttttccgtaccctctgaacgattccagcagcccaaagagttgtgcaagccaggatagctctgccttcagcccaagctccgattctcttctgagcagcactgagtcatcccctcagggttccccagagcctctggtgcttcatgaggagactccccctactacttcgtccgactccgaggaggaacaggaagatgaggaagaaattgatgtggtatccgtggagaagagacaggctccgggcaagcggtcagaatctggaagcccatcagcaggaggtcacagcaaacccccgcacagccccctggtgctcaaaagatgccatgtctctacacaccagcataattacgccgcgccgcctagcacccggaaggattaccctgctgccaagagggtcaagctggatagtgttcgcgttctcaggcaaatctccaacaataggaaatgtacatcaccccggtcaagcgatacagaggagaatgtaaaacggagaacccataatgtgttggaacggcaacgtcgaaatgagcttaagcggtcctttttcgcgttgcgcgatcagatcccagaacttgaaaacaacgagaaagcccctaaggtggtgatcctaaagaaggcaaccgcatatattctctccgtccaggcggaggagcagaagctgatctctgaggaggacctccttcgcaagcgccgagagcagttaaagcataagttggaacagctccgaaattcatgcgcc

SEQ ID NO: 21230 - DNA, 1317 bp, synthetic construct; identical to SEQ ID NO: 21229
  misc_feature 1..1317: note = source = /note="Description of Artificial Sequence: Synthetic coding sequence"
  source 1..1317: mol_type = other DNA

SEQ ID NO: 21231 - DNA, 1317 bp, synthetic construct
  misc_feature 1..1317: note = source = /note="Description of Artificial Sequence: Synthetic coding sequence"
  source 1..1317: mol_type = other DNA
atgccactcaatgtgtccttcaccaaccgcaactacgacttggattacgatagcgtgcagccttacttctactgtgatgaggaggaaaacttttatcaacagcagcagcaatccgaactccaaccacccgccccttcggaagatatctggaagaagtttgagcttctgccgaccccaccgctttcaccttcgagaaggtccggtttgtgttccccttcatacgtcgcagtgaccccgtttagcctccgcggagacaatgatggaggaggaggatcatttagcacggcagaccagcttgagatggtgaccgagctccttggaggtgacatggtgaatcagtcgttcatttgtgatcccgacgacgaaactttcatcaagaatatcattatccaagactgcatgtggtcgggattctccgccgcagccaagctcgtgtcggaaaagctggcgtcctaccaggccgccagaaaagactccggatcaccaaaccctgcacgcgggcatagcgtttgcagcacctccagcctgtacctccaggacctgagtgcggctgctagcgaatgcatcgatccctccgtcgtattcccgtaccccctgaacgattcctcctccccgaagtcgtgcgcctcacaagatagttccgcattctccccgtcatccgactccctgctgtcgtcgaccgagtcgtcaccgcagggatcgccagagccactggtccttcatgaagaaaccccgcccactacctcgtctgactccgaagaagaacaggaagatgaggaagagatcgacgtcgtctccgtcgagaaacggcaagcgccaggcaaacgctctgagtcaggtagcccgtccgccggaggccactcaaagccgccacactcacctctggtgctgaagcgctgccatgtgtcaactcatcagcacaactacgccgctccaccgtcgactaggaaggactacccagccgctaagagggtgaaacttgattcggtgagggtgctgcgccagatctcgaacaatcgcaaatgcactagcccccggagctcagacactgaggaaaacgtgaagcggcggacccacaacgtgttggagaggcagcggcgcaatgaactgaagaggtctttcttcgctctgcgagatcaaatccccgaactggagaacaatgagaaagcacctaaggtggtcatcctcaaaaaggctactgcctacatcctgtcggtgcaagcggaagagcaaaaacttatcagcgaggaggatctgctgcgcaagagaagagagcagcttaaacacaagctggaacaactgcggaattcttgtgcg

SEQ ID NO: 21232 - DNA, 1317 bp, synthetic construct; identical to SEQ ID NO: 21231
  misc_feature 1..1317: note = source = /note="Description of Artificial Sequence: Synthetic coding sequence"
  source 1..1317: mol_type = other DNA

SEQ ID NO: 21233 - DNA, 1317 bp, synthetic construct
  misc_feature 1..1317: note = source = /note="Description of Artificial Sequence: Synthetic coding sequence"
  source 1..1317: mol_type = other DNA
atgcccctgaatgtgtctttcacaaacaggaattatgatctggactatgactcagtgcagccttacttctattgcgacgaagaagagaacttttatcagcaacagcagcagtccgaactccagccccccgctccttccgaggacatatggaaaaagttcgagctgcttcctactccgcctctgtcacctagccgaagaagcgggctgtgctctccatcttacgtggcagtcacacctttctcactgagaggggataatgatgggggtgggggatctttcagcaccgccgatcagctcgagatggtgacagaattgttgggtggcgatatggttaatcaaagttttatttgtgacccagatgatgagacgtttataaagaacatcattattcaggactgcatgtggtctggcttcagcgccgctgcaaagttggtttcagagaaactggcaagctaccaggccgcaaggaaggattctggatcacctaaccccgctcgaggtcactcagtttgcagtacgtctagtctctatttgcaggacctgtccgcagctgcttctgagtgtatagatcccagcgtggtttttccttaccccttgaacgacagtagcagcccaaagagctgcgcctctcaagacagctccgccttctccccaagttcagactctctgttgtcctctactgaaagctcaccacagggaagcccagagcctctggtactgcacgaggaaactccgcctactactagtagcgattccgaagaggaacaagaagatgaggaagagattgacgttgtctctgtggaaaagaggcaggcaccgggcaagaggtccgagtcaggttccccatcagccggggggcatagtaaacctcctcatagtcctttggtcctcaagagatgccatgtgagcactcaccagcacaattatgccgctcctccctcaacccgaaaggactatccagccgctaaacgggtcaaactggacagcgtgagagtcctgcggcagatttccaacaaccggaagtgcacgtcacccaggtccagcgataccgaggaaaacgttaaacgccggacccataatgtgctggagcggcagcgcaggaatgagctgaagaggtctttcttcgcattgagagaccaaatcccagaactggaaaataatgagaaggcacctaaggttgtgatccttaagaaagccaccgcttacatcttgtctgtgcaggctgaggagcaaaaactgatttcagaggaggacttgctcaggaagaggagggaacaactgaaacataaactcgaacagctgcggaatagctgtgca

SEQ ID NO: 21234 - DNA, 1317 bp, synthetic construct; identical to SEQ ID NO: 21233
  misc_feature 1..1317: note = source = /note="Description of Artificial Sequence: Synthetic coding sequence"
  source 1..1317: mol_type = other DNA

SEQ ID NO: 21235 - DNA, 1317 bp, synthetic construct
  misc_feature 1..1317: note = source = /note="Description of Artificial Sequence: Synthetic coding sequence"
  source 1..1317: mol_type = other DNA
atgccactcaacgtaagctttacaaacaggaactacgaccttgattacgatagcgtacagccatatttttattgtgacgaggaagagaacttctaccagcagcagcagcagtctgagctccaacccccagctccttcagaggatatctggaagaagttcgagcttctgcctacccccccactgtctcctagtcgtagatctggactgtgttccccttcatacgtcgccgtcactccatttagcttgcgcggtgacaacgatggcggtggtggcagctttagtactgctgatcagctggagatggtaacagagctgctgggcggtgacatggttaatcaatcatttatatgtgatcccgacgacgagacattcatcaagaacatcatcatccaggattgcatgtggtctggcttctcagccgctgcaaaactggtgagtgagaagcttgcctcataccaggcagcaaggaaggacagcggcagccctaaccccgccagaggtcattctgtgtgttctacatcatcattgtacctgcaagatctgtcagctgccgcaagcgagtgcatcgacccttctgtggtgtttccctaccctctcaacgactcatcatcccccaaatcctgcgccagccaggactctagtgcttttagccctagttccgactccctgctgagctccaccgagtcatcaccacagggtagtccagagcctctcgtcctgcacgaggagacaccaccaaccacaagctctgacagtgaagaagagcaggaggatgaggaagaaatagacgtggtcagcgtggaaaagaggcaggccccaggaaaaagatctgaatctggatccccaagcgctggcggacactctaagccccctcactctccccttgtattgaagcgttgtcatgtttccacccatcagcacaactatgctgctcccccttcaactagaaaggactatcctgcagccaagagagtcaagctggactcagtgcgtgtgctcaggcagatatctaacaacagaaagtgtacatctccacgtagtagcgacacagaggaaaacgtgaaacgccgcacacacaacgtgctggagcgccaacgccgcaatgagctgaaacgctccttctttgccctgcgcgaccaaattccagaactggaaaacaacgagaaagctcccaaggtagtcattttgaaaaaggctactgcctatatcttgtcagttcaagcagaggagcagaaacttatttccgaggaggacttgctcaggaagaggagggaacagcttaagcataagctcgaacagctgaggaactcatgcgcc

SEQ ID NO: 21236 - DNA, 1317 bp, synthetic construct; identical to SEQ ID NO: 21235
  misc_feature 1..1317: note = source = /note="Description of Artificial Sequence: Synthetic coding sequence"
  source 1..1317: mol_type = other DNA

SEQ ID NO: 21237 - DNA, 1317 bp, synthetic construct
  misc_feature 1..1317: note = source = /note="Description of Artificial Sequence: Synthetic coding sequence"
  source 1..1317: mol_type = other DNA
atgccgctgaacgttagctttactaacagaaactacgacctggactacgacagcgtgcagccatacttttactgtgacgaagaggaaaacttttaccagcagcagcaacagtccgaactgcaacccccagccccttcagaagatatctggaaaaagtttgaactcctgccgaccccaccgctgtcccccagccggagaagcgggctgtgttccccatcctacgtcgcggtcactccgttctccctcagaggagataatgacggaggaggcggatccttttcaactgcagaccaactggaaatggtgaccgagctcctgggcggggacatggtgaaccaatcgtttatctgcgacccggatgatgaaacgttcatcaagaacataatcattcaggactgcatgtggtcaggattctcggcggcggcaaagctggtgtcggagaagctcgcatcctaccaggccgcccggaaggatagcggctcgccgaaccccgcaaggggtcattcagtgtgctcaactagctccctctatctccaggatctgagcgcggctgctagcgagtgcatcgacccatcggtggtctttccgtaccctctcaatgactcctcctcgcctaagtcgtgcgccagccaggactcatcagcgttctcgccgtcatccgactccttgctcagctcgactgagtcctcaccacagggtagcccagagccactggtgctccatgaagaaaccccgccaaccaccagctcggactccgaggaagagcaagaggacgaggaggaaatcgatgttgtctccgtggaaaagcgccaggccccaggaaagagaagcgaatccggatctccatcggcaggtggccattcaaaaccgccccactcccccctggttctgaagcgatgtcatgtgtctacccaccaacacaactacgccgcgcccccgtcgacccggaaggattaccccgcggcaaagagagtcaagctggactcggtgcgggtgctgcgccaaatctccaacaataggaagtgtacctccccccggtcctcggacactgaggaaaacgtgaagcggcgcactcacaacgtcctcgaaagacagcgccgcaatgagctcaaacggtcgttctttgccctccgcgaccagatccctgagcttgagaataacgaaaaggctccgaaagtggtgatcctgaagaaagcgactgcatacatcctcagcgtgcaagccgaagagcagaaactcatttccgaagaagatctgctgcgcaaacggagggagcaactgaagcacaaattggagcaactgcgcaactcgtgcgct

SEQ ID NO: 21238 - DNA, 1317 bp, synthetic construct; identical to SEQ ID NO: 21237
  misc_feature 1..1317: note = source = /note="Description of Artificial Sequence: Synthetic coding sequence"
  source 1..1317: mol_type = other DNA

SEQ ID NO: 21239 - DNA, 1317 bp, synthetic construct
  misc_feature 1..1317: note = source = /note="Description of Artificial Sequence: Synthetic coding sequence"
  source 1..1317: mol_type = other DNA
atgcccctcaatgtcagcttcacgaaccgcaactatgacttagattatgacagcgtccaaccatatttctactgcgacgaggaggagaatttctaccaacagcagcagcagagtgagctgcagcctccagctccaagcgaagatatttggaaaaaattcgaactactgccgactcccccattgagcccatcccgacggtcaggattgtgtagtccatcctacgtggctgtgacccctttctctcttcgaggggacaacgatggagggggagggtcattctccaccgccgaccagcttgaaatggtgacggagctgcttgggggggatatggtcaatcaatcattcatttgtgaccctgacgatgagacctttatcaagaatattatcatacaggactgtatgtggagcgggtttagcgcagcggcaaagctggtctcagaaaaattggcctcctatcaggcagctcgtaaagatagcggtagcccaaatcccgccagaggacattcagtgtgtagcacgagttccctgtacctccaagatctgagcgcagctgcttctgagtgtatcgacccaagcgtggtctttccgtaccccctgaatgattcctcatcacctaaatcttgcgccagccaggactcaagcgctttctccccgtcatcggacagtctcctgagctccacagaatcgtccccccaaggtagcccagagcccttggtcttgcacgaggagactcctcccaccacatcttctgactctgaggaggagcaggaagacgaagaggaaatcgatgtcgtgagcgtggagaaaaggcaggcccccgggaagcggagcgaaagtgggtcaccatccgccggtgggcactccaagccaccccattcgcctttggtgctgaaacggtgtcatgtttctacgcaccagcacaattacgccgctcctcccagtacgagaaaggattaccccgctgccaagagggtgaaactggacagtgtaagagttttgagacagatctccaacaacagaaaatgcaccagccctaggtcctctgacacagaggagaacgtgaagcgccgcacccataatgtgctggagcggcagcgtagaaatgagctgaagcggtcttttttcgccttgagagaccaaatccccgaactcgaaaacaatgagaaggctcccaaagttgtgatcctgaagaaggcaacagcctatatcctaagtgtgcaggcggaggaacaaaaattaatctctgaggaagacctgcttcggaagagaagagaacagctcaaacacaagctggaacagctgagaaattcctgcgca

SEQ ID NO: 21240 - DNA, 1317 bp, synthetic construct; identical to SEQ ID NO: 21239
  misc_feature 1..1317: note = source = /note="Description of Artificial Sequence: Synthetic coding sequence"
  source 1..1317: mol_type = other DNA

SEQ ID NO: 21241 - DNA, 1317 bp, synthetic construct
  misc_feature 1..1317: note = source = /note="Description of Artificial Sequence: Synthetic coding sequence"
  source 1..1317: mol_type = other DNA
atgccacttaacgtgtccttcactaaccgcaactatgacctggactatgactccgtgcaaccttacttctattgtgatgaggaggagaacttctatcagcagcagcaacagtcagaacttcaaccaccggccccctcagaagacatctggaaaaagttcgaattgctcccaaccccccccctgagtccttctagacgctcagggctgtgctcccccagttacgtcgcggtgacccccttttcacttcggggcgataacgacgggggcggagggagcttcagcactgccgaccagctggagatggtcacagagctgctggggggagacatggtaaatcagtcgtttatttgcgacccggatgatgagacattcataaagaacatcatcatccaggattgcatgtggtctggcttcagcgcagccgccaagctggtgtctgagaagctagcatcataccaggccgcgcggaaagattccggatcacccaatccagctcgtggtcatagcgtttgcagcacttcctcactctaccttcaggatctcagcgctgctgcttctgagtgcattgatccgtccgtggtgtttccttatccacttaacgacagttcaagccctaaatcctgtgcgtcccaagatagttctgccttctcaccaagcagtgattctctgctgagcagcacggagagctctcctcaggggtcccccgagccattggttctgcacgaagagacgccccccacaacatcctctgattcggaagaagaacaagaggacgaagaggaaatcgacgttgtgtccgttgaaaaaagacaggcccctggaaaaaggtcggagagcggttctccatccgccggagggcacagcaagccaccgcatagccccttagtactgaaaaggtgtcacgtgtctacccaccagcataattatgccgcgccgccctcaacacgaaaggactatccggcggctaaacgggtgaagcttgatagcgttcgggtcctgcgacaaattagcaacaaccggaaatgtactagcccccgatcatcggacaccgaagaaaacgtgaagagaaggacacataacgtgctcgaaagacagaggcggaatgagctcaagagatccttttttgctttgagggatcagatacccgaacttgagaacaatgagaaggcacctaaggttgtgatcctgaaaaaagcaacagcttacatccttagcgtccaggccgaggagcagaaactcatctcagaggaagatcttctgagaaagagaagggaacagcttaaacacaaacttgagcagttacggaacagttgcgca

SEQ ID NO: 21242 - DNA, 1317 bp, synthetic construct; identical to SEQ ID NO: 21241
  misc_feature 1..1317: note = source = /note="Description of Artificial Sequence: Synthetic coding sequence"
  source 1..1317: mol_type = other DNA

SEQ ID NO: 21243 - DNA, 1317 bp, synthetic construct
  misc_feature 1..1317: note = source = /note="Description of Artificial Sequence: Synthetic coding sequence"
  source 1..1317: mol_type = other DNA
atgcctctcaacgtcagttttactaatcggaattacgacctggattacgacagcgtgcaaccttacttctactgcgacgaggaggaaaatttttatcaacagcagcagcagtctgaactccagcccccagccccctccgaagacatttggaaaaaattcgagctgttaccaacacctcccctctctccgagccgccggtccgggctgtgcagtccgtcctacgtggccgttacgcctttctctctccggggtgacaatgacggcggaggcggaagtttctctacagccgatcaactggaaatggtgaccgaactgttgggaggtgacatggtcaaccagagctttatctgcgatccagacgacgagacctttatcaagaatattataattcaggactgtatgtggtccggtttttcagcggcagctaagttggtgagcgagaagctcgccagctatcaggcggctcgtaaggactccggttcaccgaatcccgcacgtggccacagcgtctgttctacctcctctctgtacttgcaggacctgtccgccgctgcaagcgagtgcatcgacccaagcgttgtgttcccttatccattgaacgacagctctagccccaagtcctgcgccagtcaagactcctcagcattttcaccatcctcggatagcctgctgtcttccaccgaaagctcaccacaaggctcaccagagcccctggttctgcacgaagagactccacctactacaagctccgattccgaggaggagcaggaggatgaggaggaaattgacgtggtgtcagtggagaaaagacaggccccgggaaagcgatccgagagcggatcccccagtgctggtggacatagtaaacccccccattccccactggtcctgaagagatgtcacgtttctacccatcagcacaactatgcggcgcccccttctacacgcaaagattatcccgccgccaaacgagtgaagctcgattcagtgcgcgtgctgaggcagataagtaacaaccgcaagtgtacatcacctcggtccagcgatactgaggagaacgttaagcggaggactcacaatgtgctggaacgtcagcgacgaaatgagctgaagaggtcatttttcgccctgcgggaccagatcccagagctagagaacaacgagaaggcccccaaagttgtgatcctcaagaaggctacggcgtacatcctgtccgtccaggctgaggaacagaaattgatttccgaggaggacctcctgaggaagcgccgagagcagctgaagcacaagttagagcagcttcgtaactcatgcgca

SEQ ID NO: 21244 - DNA, 1317 bp, synthetic construct; identical to SEQ ID NO: 21243
  misc_feature 1..1317: note = source = /note="Description of Artificial Sequence: Synthetic coding sequence"
  source 1..1317: mol_type = other DNA

SEQ ID NO: 21245 - DNA, 1317 bp, synthetic construct
  misc_feature 1..1317: note = source = /note="Description of Artificial Sequence: Synthetic coding sequence"
  source 1..1317: mol_type = other DNA
atgcctttgaacgtgtcgttcactaataggaactatgacctggattacgactcagtgcagccgtacttctactgcgatgaggaagagaacttctaccagcaacagcagcaatcagaacttcagcctccggcgccgtcggaggatatctggaagaaattcgagttgctgccgacgccgccgctcagcccgagccgccggtcaggcctctgctccccaagctacgtggcagtgaccccgttctccctcagaggagacaatgacggaggagggggctcctttagcactgccgaccaactggagatggtgactgagctgctgggaggagacatggtgaaccagtccttcatctgcgatccggacgacgaaactttcatcaagaacatcatcatccaagattgcatgtggagcggattttctgcagcagctaaattggtgtcagagaaactcgcctcatatcaggcagccagaaaggactcgggcagccccaacccggccagaggacactcagtgtgcagcacttcgtcgctgtacctgcaagacctgtccgccgcagcttcggagtgcatcgaccctagcgtggtgtttccataccccttgaacgactcgtccagcccaaagtcgtgtgcgtcccaggacagctccgccttcagcccgtcctcggacagcctcctgtcatcgaccgagtcctcgccacaggggtccccggagccgctcgtcctgcacgaagaaaccccgccaacgacttccagtgatagcgaggaggaacaggaagatgaggaagaaatcgatgtggtttccgtggaaaagagacaggctcctggaaagcgctcggagtcgggaagcccgagcgccggaggacatagcaaaccgccccactctcctctggtcctgaaacggtgtcacgtctccacccaccagcacaactacgccgccccgccctcgactcggaaggactacccggccgcaaaacgggtgaagttggacagcgtccgggtgctccgccaaatctcaaacaacagaaaatgtacctcacctcgctcatccgacacggaagagaatgtgaaaaggaggacccataatgtccttgaacggcagcgccgcaacgaactgaagcggagctttttcgcgcttcgggaccagatcccagaactggagaataacgaaaaggccccgaaggtggtcatcttgaagaaggccacggcttacatcctttcagtgcaagctgaggaacagaaactgatctccgaagaggacctcctcagaaagcggcgcgagcaactgaagcacaagctggaacagcttagaaattcgtgcgca

SEQ ID NO: 21246 - DNA, 1317 bp, synthetic construct; identical to SEQ ID NO: 21245
  misc_feature 1..1317: note = source = /note="Description of Artificial Sequence: Synthetic coding sequence"
  source 1..1317: mol_type = other DNA

SEQ ID NO: 21247 - DNA, 1317 bp, synthetic construct
  misc_feature 1..1317: note = source = /note="Description of Artificial Sequence: Synthetic coding sequence"
  source 1..1317: mol_type = other DNA
atgcctctgaacgtgtcatttacaaataggaactacgacctcgattacgacagtgttcaaccatatttttactgcgacgaagaagagaacttctatcagcaacagcagcagagcgagctgcagccacctgctccatccgaggatatctggaagaaatttgagctcctaccaacacctcccctgagcccgtctagacggagcggcctctgctccccctcttacgtcgctgtgacgcctttcagtctccgaggagataatgatggagggggcgggtctttcagtactgctgaccagttagaaatggtgactgagctccttggcggggacatggtcaatcagagcttcatctgcgacccagacgatgagacttttatcaagaatatcattatccaagattgtatgtggtccggtttcagtgcagctgctaagctcgtttctgagaaactagcttcctaccaagccgcgagaaaggacagtgggtcacctaacccagctcgggggcactctgtttgtagcacgagcagcctctatctgcaagatctgtctgctgcggccagcgagtgcatagatccatcggttgtcttcccctacccactgaatgacagtagtagtcccaagtcctgcgcaagtcaggactctagcgcattctcaccaagttctgacagcctgctgagctccaccgagtcctccccacagggatcacctgagcctctcgtgctgcacgaggaaacccctcccacaacatcctccgattctgaggaggaacaggaggacgaggaggaaattgacgtcgtgtccgtggagaaacggcaggcaccagggaagcgatctgaatctggctccccctccgcagggggtcattccaagcctccgcactcccccctggtcctaaagcggtgtcatgtatctacccatcaacacaactatgccgctccccctagcacccggaaagactatcctgcggcaaagcgggtgaagctggattctgtgcgtgtgctgcgccagatcagtaacaaccgcaagtgcacgtctccaagaagttccgatactgaggagaacgtgaaacgacgaactcacaacgtcctagagcggcagcgacggaatgaactaaagaggtccttttttgctctgagagaccagatccctgagctggaaaacaacgagaaggctcccaaagtcgtcatcctgaagaaggctaccgcatacattttgtcagtgcaggcggaggagcaaaaactgatctccgaggaagacttgcttaggaagcgtcgtgaacagcttaagcataagcttgagcagctccgtaactcctgcgcc

SEQ ID NO: 21248 - DNA, 1317 bp, synthetic construct; identical to SEQ ID NO: 21247
  misc_feature 1..1317: note = source = /note="Description of Artificial Sequence: Synthetic coding sequence"
  source 1..1317: mol_type = other DNA

SEQ ID NO: 21249 - DNA, 1317 bp, synthetic construct; identical to SEQ ID NO: 21229
  misc_feature 1..1317: note = source = /note="Description of Artificial Sequence: Synthetic coding sequence"
  source 1..1317: mol_type = other DNA

SEQ ID NO: 21250 - DNA, 1317 bp, synthetic construct; identical to SEQ ID NO: 21229
  misc_feature 1..1317: note = source = /note="Description of Artificial Sequence: Synthetic coding sequence"
  source 1..1317: mol_type = other DNA

SEQ ID NO: 21251 - DNA, 1317 bp, synthetic construct
  misc_feature 1..1317: note = source = /note="Description of Artificial Sequence: Synthetic coding sequence"
  source 1..1317: mol_type = other DNA
atgccacttaatgtatcttttacaaacaggaactacgatctggactacgattccgtccagccctacttttactgtgatgaggaagaaaatttttaccagcagcagcagcagagcgaacttcagcctccagccccaagcgaagatatatggaaaaaatttgagctgctgcccacaccccctctctctccttctaggcgcagcggactgtgctctcccagctacgtcgcagtgactcccttcagtcttcggggggacaacgacggcggaggggggtctttcagcacagccgaccagctcgagatggtgacagagctgctcggaggcgatatggtcaatcagtcctttatttgcgatcccgatgatgaaacatttattaaaaacatcataatccaagactgcatgtggtccgggttctctgctgcggcgaaattggtgtcagagaaacttgcgtcctatcaagcagccaggaaggacagcggtagcccaaatccagctagaggtcattctgtctgcagcacgagctctctgtacctgcaagatctgtccgcagccgcttcagaatgtatcgaccccagtgtggtgtttccttacccgcttaatgactcatcgtcaccaaaatcatgcgcatcacaggattcctcagcctttagcccttcatccgattcgctgctctcaagcactgagtcgagtccccaaggaagccccgaaccactcgtcctgcacgaagagacacccccaacaacttctagtgatagtgaggaagagcaggaagacgaggaggaaatcgatgtggtttccgtggaaaagcggcaggcccctggtaagagatctgagagcggtagcccatcagcaggcggtcatagcaagccgccgcactccccactcgtgttgaagcgctgtcatgtgagcactcaccagcataattatgccgcacctccaagtacacggaaggactatcccgctgcgaagcgcgtcaagctagactccgtccgggtactgaggcagatttcaaacaaccggaagtgtactagccccaggagtagcgacacggaagagaacgtgaagagacgaacacataacgtgttagagcgccagcgcagaaacgaactgaaacgatcattttttgctctgagggaccaaatccccgagctggaaaataatgagaaggcacctaaagtggtcatactgaagaaagcaaccgcgtacatactgtctgtccaggccgaggaacaaaaactcatctccgaagaagatctgctgcggaagcgacgcgagcagctgaagcacaaacttgaacagttgaggaattcatgtgcg

SEQ ID NO: 21252 - DNA, 1317 bp, synthetic construct; identical to SEQ ID NO: 21251
  misc_feature 1..1317: note = source = /note="Description of Artificial Sequence: Synthetic coding sequence"
  source 1..1317: mol_type = other DNA

SEQ ID NO: 21253 - DNA, 1317 bp, synthetic construct
  misc_feature 1..1317: note = source = /note="Description of Artificial Sequence: Synthetic coding sequence"
  source 1..1317: mol_type = other DNA
atgccactgaacgtgtccttcaccaacaggaactacgacctggattacgattcagtgcagccgtacttctactgcgatgaagaagagaatttctaccaacaacagcagcagtcggaactccagccgccggccccgtcagaggacatctggaagaagtttgaacttctgccgactccgcccttgagcccgtccaggcgctccggcctgtgctccccgtcctacgtggctgttaccccgttttctctgcgcggagacaacgacggaggtggtgggtccttctccactgccgaccagttggaaatggtgactgagctccttggaggagatatggtgaatcagagcttcatctgcgacccggatgatgaaaccttcatcaaaaacatcatcatccaggattgcatgtggtctggcttcagcgcagccgcgaaactggtgagtgaaaaacttgcttcataccaggctgcccggaaggactcgggatccccgaatcccgcccgcggacactccgtctgctcgacctcgtcgctctacctgcaggatctgtcagcagcggcctcggaatgcatcgacccctctgtcgtctttccgtacccgttgaatgattcaagctcgccgaaaagctgcgcctcacaggattcttcagcgttcagcccttcatcagactcgttgctgagctccactgaatcgagcccgcagggatcgccggagcctctggtcctccacgaggaaactccgccaacgacctcatcggacagcgaagaagagcaagaggacgaggaagaaatcgatgtggtatcggtggagaagagacaggcccctgggaagcgcagcgaatcgggatctccttccgcaggaggccattcgaagcctcctcattcaccgctggtgctgaagcgctgccacgtgtccactcaccaacacaactacgcggcgcccccatcgactagaaaggactatcctgccgcaaagagagtgaaactcgactcagtgagggtcctccgccaaatctcgaataatcgcaaatgtacctcaccgcgctcatcagatacggaggagaacgtgaaacgccgcacccacaatgtcttggagcgccagagacggaacgagctcaagcggtcgttcttcgcgctgcgcgaccagatcccggagttggaaaacaatgaaaaggcaccaaaagtcgtgatcctcaagaaagcaacggcctatattctcagcgtgcaagcggaggaacagaagctgatctccgaagaggacctcctgcgcaagagacgcgaacaactgaagcacaaactcgagcagctgagaaactcgtgtgca

SEQ ID NO: 21254 - DNA, 1317 bp, synthetic construct; identical to SEQ ID NO: 21253
  misc_feature 1..1317: note = source = /note="Description of Artificial Sequence: Synthetic coding sequence"
  source 1..1317: mol_type = other DNA

SEQ ID NO: 21255 - DNA, 1317 bp, synthetic construct
  misc_feature 1..1317: note = source = /note="Description of Artificial Sequence: Synthetic coding sequence"
  source 1..1317: mol_type = other DNA
atgccactgaatgtgagcttcactaacagaaactacgacctggattacgactcggtgcagccttacttttactgtgatgaagaggagaacttctatcagcaacaacaacaatcagagctgcaaccacctgcgcccagcgaggatatctggaagaaatttgaacttctgcctaccccgccactgtcaccaagccgcaggtcgggactctgttcaccttcgtacgtggcagtcacgcctttttcccttcgcggagataatgatggtgggggtgggtcgttctctactgccgatcaattggaaatggtgactgagcttttgggaggagatatggtgaaccaatcgttcatctgtgatcctgacgatgaaactttcataaagaacatcatcattcaagactgcatgtggtcgggatttagcgcagcagctaaacttgtctccgaaaagttggcgagctatcaggcagctagaaaggattccggttcgcctaatcctgctagggggcactcagtgtgttcgacttccagcctttacctgcaagatctgagcgcagccgctagcgaatgcatagacccatccgtggtgttcccatacccgctgaatgattcctcatcaccaaaatcgtgcgcatcacaggattccagcgctttcagcccatcgtcggactcgcttcttagctccactgaatcgtcccctcaaggctcgcctgaaccgcttgtgcttcacgaggagactcccccaaccacctcctcggactcggaagaagagcaggaggatgaagaagaaattgatgttgtgtcggtggagaagcggcaggctccgggaaagaggtcagaatcgggatccccaagcgcgggtggtcatagcaagcccccgcattcaccactggtgctcaagcgatgtcatgtctcgactcatcaacataactacgcagccccgcccagtaccagaaaagattaccctgccgcaaagagggtgaaactggactcagtcagagtgctgagacaaatttctaataacagaaaatgtacctcgcctcgttccagcgatactgaagaaaacgtgaagagaaggacgcataacgtgcttgaaagacagcgcagaaatgaattgaaacggagcttctttgcacttagagatcaaatacccgaactggaaaacaatgaaaaggccccgaaggtagtgattctgaaaaaggcgaccgcctacatactgtcggtccaagcagaagagcaaaaactgattagcgaagaagatctgctgcgtaagcgcagagaacagcttaagcataagctcgaacagctccggaattcgtgcgca

SEQ ID NO: 21256 - DNA, 1317 bp, synthetic construct; identical to SEQ ID NO: 21255
  misc_feature 1..1317: note = source = /note="Description of Artificial Sequence: Synthetic coding sequence"
  source 1..1317: mol_type = other DNA

SEQ ID NO: 21257 - DNA, 1317 bp, synthetic construct
  misc_feature 1..1317: note = source = /note="Description of Artificial Sequence: Synthetic coding sequence"
  source 1..1317: mol_type = other DNA
atgcccctgaatgtctcttttaccaatcgaaattacgatcttgactacgactccgttcagccctacttctattgtgatgaggaagagaatttctatcagcagcagcaacagtctgagctacagccgccagccccttcagaggacatctggaagaagttcgaactgctgcctacacccccgctatcaccttctcgcagatcaggcctatgtagcccctcctacgtagccgttaccccctttagcttgcgcggcgacaatgacggcggcggaggaagcttctccaccgctgatcagctagagatggtgacagagctgctgggtggggacatggtgaatcagtccttcatttgcgatcccgacgatgaaacctttatcaagaatattattattcaggattgtatgtggagcgggttcagcgctgccgccaagctggtttccgaaaagctcgccagttaccaggccgccaggaaggattcaggtagtcccaatccggcacgggggcacagcgtatgtagcacttcttctctgtatcttcaggatctgagcgccgcagcttcggaatgtatcgatccctccgtggtgttcccctatccactcaacgattccagtagccccaaatcctgtgcgtctcaggattctagcgccttcagcccgtcttccgacagcttactctctagtactgaaagtagcccacaggggagtcctgagccgctggtgctgcacgaagagaccccccccacaacatcttccgactccgaggaggagcaggaggatgaagaggaaatcgacgtggtcagtgtggagaaacgacaggcccctggaaagcggtccgagtcgggatctccttccgcagggggacacagcaagccccctcactcccccctggtgctcaaacgatgtcacgtcagcactcatcagcacaattatgctgccccccctagcaccaggaaagattaccccgccgccaagagggtgaagctggactctgttagggtcctacggcagatcagcaataatcgaaaatgcacttctcctcggagcagtgacacggaggagaacgtgaaaaggagaacccacaatgtcctcgagcgccaaaggcggaatgagctcaaaagatcattctttgcacttcgcgaccagattcctgagctcgagaacaacgaaaaggccccaaaagtcgtgattctgaaaaaggctaccgcatacatattgagcgtgcaggccgaggagcagaagctgatttccgaggaagacctgctcaggaagcggcgcgaacagctcaagcataagctagaacagcttaggaattcgtgcgct

SEQ ID NO: 21258 - DNA, 1317 bp, synthetic construct; identical to SEQ ID NO: 21257
  misc_feature 1..1317: note = source = /note="Description of Artificial Sequence: Synthetic coding sequence"
  source 1..1317: mol_type = other DNA

SEQ ID NO: 21259 - DNA, 1317 bp, synthetic construct
  misc_feature 1..1317: note = source = /note="Description of Artificial Sequence: Synthetic coding sequence"
  source 1..1317: mol_type = other DNA
atgccacttaatgttagctttactaacagaaattacgatcttgattacgactcggtccagccatacttttactgtgatgaagaggaaaatttttatcaacaacaacagcaatctgaattacagccaccggcaccttcagaggatatttggaaaaaattcgagttgctgccaacgccaccattgtcgccaagtcgtcgatcaggactctgctctccatcatacgttgctgtgactccattttctttgcgtggagataatgatgggggcggaggatcattctccacagcggaccaactcgaaatggtcacagagttgttgggtggagatatggttaaccaatcttttatttgtgatccggatgatgaaactttcattaagaatatcatcattcaagattgtatgtggtcgggcttttcagctgccgccaagcttgtttctgaaaaacttgcctcttatcaggcagcacgaaaagatagcggatctccaaacccggccaggggacattcagtatgttctacgagctccctttatttacaagatttgtccgctgcggcatccgagtgcattgatccgagcgttgtgtttccgtatcctcttaacgattcaagcagtcctaaatcgtgcgcgtctcaggattcctcagcattctccccctcatcagattcattactttcaagcacggagtcatcacctcaggggtcaccggaacctttggttcttcatgaggagactccacctaccactagctctgattcggaagaggaacaagaagatgaggaagaaatagatgttgttagcgtcgagaaacgacaggcaccaggtaagcgatctgagtctgggtcaccatccgcgggaggacattcaaagccgccacattctccgctcgtactcaaaaggtgtcacgtgtcaacgcatcagcataattacgccgctccaccatcgactagaaaagactacccggctgctaagagagtcaagctagattcagttcgagtgttaagacaaatttccaataaccgtaagtgcacttctccacgtagttctgatactgaagaaaatgtgaaacgacgtacccacaatgtcctcgaacgtcagcgccgaaatgagttgaaacgttctttctttgctctaagggatcaaataccagaacttgaaaataatgagaaagcaccgaaggttgtgattctgaaaaaggctactgcctacatcttgagcgttcaggctgaggaacaaaagctaattagcgaagaggatctacttagaaagagaagggaacaacttaagcacaaacttgaacaacttcgaaatagctgtgct

SEQ ID NO: 21260 - DNA, 1317 bp, synthetic construct; identical to SEQ ID NO: 21259
  misc_feature 1..1317: note = source = /note="Description of Artificial Sequence: Synthetic coding sequence"
  source 1..1317: mol_type = other DNA

SEQ ID NO: 21261 - DNA, 1317 bp, synthetic construct
  misc_feature 1..1317: note = source = /note="Description of Artificial Sequence: Synthetic coding sequence"
  source 1..1317: mol_type = other DNA
atgccactgaacgtgtcgttcaccaaccgcaattacgatctcgactacgattcggtccagccttacttttactgtgacgaggaggagaacttttaccaacagcagcaacagagcgagctccagcctcctgccccgtcggaagatatctggaagaagttcgaactgctgcctactccgccattgagcccatcgcggcggagcggactgtgtagcccctcatacgttgccgtgaccccgttctccctccggggggacaacgatgggggaggcggatccttttccaccgcggaccaactcgaaatggtgaccgaactgcttggaggtgatatggtcaatcagtcgttcatctgcgacccagatgatgaaactttcatcaagaatatcattatccaagactgcatgtggtcaggattcagcgccgccgcaaagctggtgtccgagaagctggcttcctaccaagcagcgcggaaggactcgggatcaccgaacccagcgcgcggacattccgtttgtagcacctcgtcattgtacttgcaagacctctcggcggctgcctcggaatgcatcgatccttctgtcgtgtttccgtacccgttgaatgattcctccagcccaaaatcctgcgcctcgcaggacagctcagcattctcgccaagcagcgatagcttgctgagctcgacggaatcaagccctcaggggtccccagaaccgttggtgctgcacgaggaaacccctcctaccacttcctcggattcagaggaagaacaggaagatgaagaagagattgatgtggtgtccgtggaaaaacgccaggcgccaggcaagaggtcggaatcggggagcccaagcgcagggggccactcgaagccaccgcattcgccgctcgtgctgaagcgctgccacgtgagcactcaccaacacaattacgcggcccctcccagtaccagaaaagactaccccgcggcgaagagagtgaagctggattccgtccgcgtcttgcggcaaatctcgaacaatcggaagtgcaccagcccccgcagctcagataccgaggagaacgtgaagcgcagaactcataacgtcttggagcggcagaggagaaacgaactgaagcgctcattctttgcactccgcgaccagattccggagttggagaacaacgagaaggccccgaaggtggtcatcctgaaaaaggccaccgcttacatcctgagcgtccaggccgaggaacaaaagctgatctccgaggaggatctgctgcgcaagagacgcgaacagctgaaacacaagctcgagcaactcaggaactcttgcgcc

SEQ ID NO: 21262 - DNA, 1317 bp, synthetic construct; identical to SEQ ID NO: 21261
  misc_feature 1..1317: note = source = /note="Description of Artificial Sequence: Synthetic coding sequence"
  source 1..1317: mol_type = other DNA

SEQ ID NO: 21263 - DNA, 1317 bp, synthetic construct
  misc_feature 1..1317: note = source = /note="Description of Artificial Sequence: Synthetic coding sequence"
  source 1..1317: mol_type = other DNA
atgcccctcaatgtctcttttacgaataggaactacgacctcgactatgactcagttcaaccatatttctactgtgacgaggaggagaatttctaccagcagcaacagcagtccgagctccagccacccgctccatccgaagatatatggaaaaaattcgagctcttgcccacacctccactttctcccagcaggcggagtggcctctgcagcccatcctatgtcgccgttacaccctttagccttagaggagataatgacggaggaggtggtagcttcagtactgccgatcaactggaaatggtgactgagcttctcggcggagatatggtgaaccaaagctttatttgtgatcccgacgacgaaacattcattaagaatatcatcatacaggattgtatgtggtccggatttagcgccgcagctaagttggtgagcgagaaactcgcctcttatcaggccgcgcggaaagactccggatctccaaaccctgcaagaggacattcagtttgcagtacaagctcactgtatctccaggaccttagcgcagcagcgtcagagtgtatcgacccatccgttgtattcccataccccctcaatgattccagttctcccaaatcttgcgcttcccaggactcttcagcctttagcccgtcctcagactcactcctgagcagtaccgaaagtagcccccagggcagcccggagccgctggtgctgcacgaggaaactccccccactactagctctgatagcgaagaggagcaggaggatgaggaggagatcgacgtagtgtcagtagagaagcggcaggctccaggaaagcgcagcgaatcaggatcaccttccgcaggtggccactcaaagccgcctcattcccccctggtgctgaagcgatgtcacgtgagtacacaccagcataactacgctgctccgccctccactcggaaggactaccccgccgcaaagcgagttaagctcgattccgtgagggtccttaggcagatctccaataaccggaaatgcacctccccgcgcagttctgacaccgaggagaacgtgaagaggcggacccacaatgtcttggaacgccagcgacgcaatgagctcaagaggtccttttttgctctgcgcgaccagatccctgaactggagaataacgagaaagctcccaaggtggtaatcctgaagaaagctacagcatatattctgtccgtacaagccgaggagcaaaagctgatctctgaggaagacctgctgcgcaaacgacgcgagcagctcaaacataaactcgaacagttgcggaactcttgtgct

SEQ ID NO: 21264 - DNA, 1317 bp, synthetic construct; identical to SEQ ID NO: 21263
  misc_feature 1..1317: note = source = /note="Description of Artificial Sequence: Synthetic coding sequence"
  source 1..1317: mol_type = other DNA

SEQ ID NO: 21265 - DNA, 1317 bp, synthetic construct
  misc_feature 1..1317: note = source = /note="Description of Artificial Sequence: Synthetic coding sequence"
  source 1..1317: mol_type = other DNA
atgcctctcaacgtatccttcaccaaccgtaattacgatttggattatgacagtgttcaaccgtatttttattgcgacgaggaggagaacttttatcaacaacaacaacaaagtgaattgcaacctcccgctcccagtgaagatatttggaaaaagttcgagttgctgcccacaccgccgctgtctcccagtcgcagaagtggcttatgctctccatcttatgtagccgttaccccgttctcgcttcgcggagataacgatggagggggcgggtcgttctcgactgccgaccaactcgagatggtcaccgagctgttgggaggcgatatggtgaaccaatccttcatctgcgaccccgacgatgagaccttcattaaaaacattatcattcaggattgcatgtggtctggattttcggccgcggcgaagttagtgagcgaaaaattagcctcgtatcaggctgcacgcaaagatagtggtagcccaaatccagctaggggccattcagtctgcagcacgagttccctatatctgcaagatctctccgctgctgcgagtgaatgtatcgatccaagtgtagtgttcccctacccgctcaacgactcgtcgtcacctaagagttgcgcctcgcaggacagcagcgcattctcgccgagttcagatagccttttaagttcgactgaatcttcgccacaaggatctcctgagcccctggttctccacgaggaaacaccccctaccacttctagcgactcggaggaagagcaggaagatgaggaggagatcgatgtagtaagcgtagagaaacgacaagcgccggggaaacgcagtgaaagtggttcgccaagcgctggcggacatagcaagcccccccactcccctctggttctcaagcgctgccacgtgtccacccaccagcacaactacgccgcgcctccgagtactcggaaggattacccagctgccaaacgggtaaaactagatagcgtccgggttcttcgccaaatttcaaacaatcgcaagtgtacgtctccacgctcgtcggacactgaggaaaatgtgaaacgccgaacacataatgttctcgagcgtcagcgacgaaacgagctgaagcgcagcttcttcgcattgcgcgatcaaatccctgaactcgaaaacaatgagaaggcccctaaagttgtcattttaaaaaaagccactgcttatatattgtctgtccaagctgaagagcagaagctgatcagtgaggaggacctcctgcggaagcgaagagaacagcttaagcacaaattggagcaacttcgtaactcctgcgcc

SEQ ID NO: 21266 - DNA, 1317 bp, synthetic construct; identical to SEQ ID NO: 21265
  misc_feature 1..1317: note = source = /note="Description of Artificial Sequence: Synthetic coding sequence"
  source 1..1317: mol_type = other DNA

SEQ ID NO: 21267 - DNA, 1317 bp, synthetic construct
  misc_feature 1..1317: note = source = /note="Description of Artificial Sequence: Synthetic coding sequence"
  source 1..1317: mol_type = other DNA
atgcctcttaatgtatcttttactaatcgtaattatgaccttgattatgattcagttcaaccatatttttattgtgatgaggaagagaatttctatcaacaacaacaacaatcagaacttcaaccacctgcaccatcggaagatatttggaaaaaatttgaattattaccaacacctccattatccccatcaagaagatcaggattatgttcaccatcttacgttgcagttacaccattttcattaagaggagataatgatggaggaggaggatcattttcaactgctgatcaattagaaatggtaactgaattattaggaggtgatatggttaatcaaagtttcatctgtgatcctgatgacgaaacatttatcaaaaatattattattcaagactgtatgtggtcaggattttctgctgcagctaaattagtatcagaaaaattagcatcatatcaagctgctcgtaaagactcaggaagtccaaatcctgcaagaggacattctgtttgttcaacttcttctctttatcttcaagatttatctgctgctgcatcagaatgtattgatccatcagtagtttttccttatcctttaaatgatagttcatcaccaaaatcatgtgcttcacaagactcttctgctttctctccatcatcagacagtttactttctagtactgaaagttcaccacaaggatcaccagaacctttagttcttcatgaagaaactccaccaactacatcatcagattctgaagaagagcaagaagatgaagaagaaattgacgttgtttcagttgaaaaaagacaggcacctggaaaaagatctgaatcaggaagtccttctgcaggtggacattcaaaacctccacactcaccattagttttaaaaagatgtcatgtttctactcatcaacataactatgcagctccaccatctacaagaaaggattatccagctgctaaaagagttaaattagattctgtaagagttcttagacaaattagtaataatagaaaatgtacatctccaaggtcatcagatactgaagaaaatgttaaacgaagaacacataatgtattagagcgacagagaagaaacgaattgaaaagatcatttttcgcccttcgagatcaaattcctgaattagaaaataatgaaaaggctccaaaggttgttattttaaaaaaagcaactgcttatattctttcagtacaagcagaagaacaaaaattaatttctgaagaagatttattaagaaaacgaagggaacaacttaaacataaattagaacagctaagaaacagttgtgca

SEQ ID NO: 21268 - DNA, 1317 bp, synthetic construct; identical to SEQ ID NO: 21267
  misc_feature 1..1317: note = source = /note="Description of Artificial Sequence: Synthetic coding sequence"
  source 1..1317: mol_type = other DNA

SEQ ID NO: 21269 - DNA, 1317 bp, synthetic construct
  misc_feature 1..1317: note = source = /note="Description of Artificial Sequence: Synthetic coding sequence"
  source 1..1317: mol_type = other DNA
atgccactcaacgtctcatttaccaaccgcaattacgatctcgattacgattcggtccaaccatacttctactgtgacgaagaagaaaacttttaccagcaacaacaacaatccgagctccaacctcctgcaccatcagaggacatctggaagaaatttgagctgttgcctaccccgcctctttcgcctagcagacggtcaggtctttgttcaccttcgtacgttgctgtcacgcccttttcgcttcgtggagataacgatggaggtgggggttcattcagcaccgcagaccagctggagatggtgactgaacttcttggtggtgatatggtgaatcagagctttatctgtgaccctgatgatgaaacctttatcaagaacattatcattcaggactgtatgtggtcggggttctccgcagcagcaaagctcgtgtcggagaaacttgccagctaccaagcagcacggaaagactcgggttcccctaatccagcacgtggtcatagcgtctgctcgacgtcatccctttaccttcaagatctgtcggcggcggcatctgaatgtattgatccatcggtggtctttccgtaccctctgaacgacagctcctccccaaagagctgcgcatcgcaggactcctcggcatttagcccttcatcggattccctgctttcctcgactgaaagcagcccacaaggatcgccagaacctcttgtgcttcacgaagaaacccctcctaccacctcgtcggacagcgaggaggagcaagaagatgaagaagaaattgacgtggtgtcggtggaaaagcgccaagcccctggaaagagatctgaatccggcagcccatccgccggaggtcattccaagccacctcatagtccattggtgctgaagaggtgtcacgttagcacccatcaacacaattacgctgctcctccttctacgcggaaagattaccctgccgccaagcgggtgaaactggactcggtgagagtgctccggcagattagcaacaataggaagtgtacctcacctagatcctcggataccgaagagaacgtgaaaagaagaacgcacaacgtgctggaacggcaacgcaggaatgaacttaaaagatctttcttcgccctgcgtgatcagatccccgagcttgaaaacaacgaaaaggcacccaaggtggtgatcttgaagaaggccactgcatacatcctttccgtgcaggcagaagagcaaaaacttatttcggaagaggacctgctgcggaagaggcgagagcaacttaagcataagctggaacaactgagaaactcctgtgcg

SEQ ID NO: 21270 - DNA, 1317 bp, synthetic construct; identical to SEQ ID NO: 21269
  misc_feature 1..1317: note = source = /note="Description of Artificial Sequence: Synthetic coding sequence"
  source 1..1317: mol_type = other DNA

SEQ ID NO: 21271 - DNA, 1317 bp, synthetic construct
  misc_feature 1..1317: note = source = /note="Description of Artificial Sequence: Synthetic coding sequence"
  source 1..1317: mol_type = other DNA
atgcctctgaacgtgtcttttaccaatagaaattatgatctagattacgattctgtgcagccatacttctactgtgatgaagaggagaatttctaccagcagcagcagcagtcagagctacagccgccggcaccttctgaggatatttggaagaaatttgagctgctgcccacaccccctctcagtccgtctcgtcgcagcgggctatgctctccctcctacgtcgcagtgactcccttttcccttcgaggtgacaatgacggggggggcggatcattctccactgccgaccagctggaaatggtgactgagttgctgggaggtgatatggtgaaccagagttttatctgtgaccccgatgacgaaaccttcataaaaaacattattatccaggattgcatgtggtccggcttctcagcagcggcgaagttagtgtccgagaagttggcaagctaccaggccgcgcgtaaggattcgggaagccctaatcccgccagagggcattccgtgtgctcaacctccagcctgtacctgcaggatctttccgctgctgccagtgaatgcattgatccctccgtggtgtttccttacccactgaatgactcttcttctccgaaatcatgtgctagccaagacagcagcgcatttagcccatcttcagactccctcctttcctctaccgagtcctccccccaagggagcccagagccactagtgttgcatgaagagacaccacccaccactagttccgattctgaggaagagcaggaggacgaggaagagatagacgtggtcagtgttgaaaaacggcaggcaccaggaaagcgctcagagagtggttctccgtccgccggggggcactccaaacctcctcattctccccttgtattgaaacgctgtcacgtgtctacacaccagcataattatgcggcccccccatctacgagaaaagattaccccgcggcgaagcgggtgaagctcgatagcgttcgcgtcttgaggcagattagcaataatcggaagtgcacgtctcctcggtccagcgacactgaggaaaacgtgaaacgacgcactcacaacgttctggagaggcagcggcgcaatgagttaaagcgatccttcttcgcactccgcgaccagatcccagagttggaaaataacgaaaaggccccaaaggtagtcattctgaagaaggccactgcctacattctgtctgtacaggccgaggaacaaaagttgatttcggaggaagacctgctacgcaagcgcagagagcaactgaagcacaagctggagcaactgcggaattcttgcgcc

SEQ ID NO: 21272 - DNA, 1317 bp, synthetic construct; identical to SEQ ID NO: 21271
  misc_feature 1..1317: note = source = /note="Description of Artificial Sequence: Synthetic coding sequence"
  source 1..1317: mol_type = other DNA

SEQ ID NO: 21273 - DNA, 1317 bp, synthetic construct
  misc_feature 1..1317: note = source = /note="Description of Artificial Sequence: Synthetic coding sequence"
  source 1..1317: mol_type = other DNA
atgccacttaacgtatcatttactaaccggaattacgacttggactatgattcggtacagccatatttctattgtgatgaggaggagaacttctaccagcaacagcagcagagcgagctgcagccaccggctcccagcgaagatatctggaagaagtttgaactacttcccacccctcccctgtctcctagccggcggagcggcctgtgcagccctagctatgtggcagtcacccccttctctttgcggggggacaacgacgggggaggtggctcttttagtaccgcagaccagctcgagatggtgaccgagttgctcggaggtgacatggtgaatcagtcatttatttgtgaccccgacgacgaaactttcattaagaatatcattatacaggactgcatgtggtccggcttttccgctgctgccaagctggtttctgaaaaactggcaagttatcaagccgccagaaaagattccggaagtcctaatcccgctagaggccatagcgtgtgttctactagctccctgtacctgcaggatctctccgcagccgcatcggagtgcatcgaccccagcgttgtgtttccttatcccctgaatgacagttcctctcccaaatcctgcgcatcacaagactctagcgcgttttcaccctcatctgactccctcttatccagcacagaaagtagccctcagggctctcctgagccgctggtcctgcatgaggaaacaccgccgaccacctccagtgacagcgaggaagaacaagaagatgaggaggaaattgacgtggtcagcgttgaaaagagacaggcaccgggtaaacgtagcgagtctggatcgccgagtgcaggaggacacagtaaacctccccactctcctctggtgttgaaaaggtgtcacgtcagtacgcaccaacacaattacgccgccccaccctctacccgcaaggactatccagctgccaaaagagtcaaacttgactctgttagggtgctgagacagataagtaacaatcggaaatgcactagccctcgctcaagtgataccgaagaaaacgtaaaaagacggactcataatgtcctcgaacggcagaggcgaaatgaactgaagagatcattctttgcactgcgagatcagatccccgagctggaaaacaacgaaaaagcacctaaggtagtcattttaaagaaggctacagcgtatatcctgagtgttcaggccgaagagcagaaactcattagcgaggaggacctcctccggaagaggagggagcagctgaaacacaagctggagcaattgagaaattcgtgcgcc

SEQ ID NO: 21274 - DNA, 1317 bp, synthetic construct; identical to SEQ ID NO: 21273
  misc_feature 1..1317: note = source = /note="Description of Artificial Sequence: Synthetic coding sequence"
  source 1..1317: mol_type = other DNA

SEQ ID NO: 21275 - DNA, 1317 bp, synthetic construct
  misc_feature 1..1317: note = source = /note="Description of Artificial Sequence: Synthetic coding sequence"
  source 1..1317: mol_type = other DNA
atgcccctgaacgtgagcttcacaaatagaaattatgacctcgactatgactcagtacaaccttatttttattgtgatgaagaggagaatttttatcagcaacagcagcaatcagagctgcagccacccgccccgagcgaggacatctggaaaaaattcgagctgcttcccaccccgccattgtctccaagtcggcggagcgggctgtgctctcctagttacgtggcagtaacgcctttctcactgaggggcgataacgatggagggggagggtcgttctcgaccgctgaccagctcgaaatggttaccgaactcttggggggagatatggtgaaccagtctttcatttgtgatcccgacgacgagacttttatcaagaatatcataatccaggattgcatgtggagcggattcagcgccgcagccaagctcgtttctgagaagctcgcaagttaccaggcggctcggaaggactcaggctctcctaatcccgctcgggggcacagtgtgtgctcaaccagctctctgtacttacaggatctgagcgctgctgctagcgaatgtatcgaccccagcgtggtgttcccgtacccattgaacgactccagctcgccgaagtcttgtgcaagccaggacagttccgccttctccccttcgagcgactcattgctttcctccaccgagagctccccacaggggagtcctgaacccctcgttctgcatgaggagactccaccaactacttcctctgattccgaagaggagcaggaggacgaggaggaaatcgacgtcgtcagtgtcgagaaacggcaggctcctggcaaacggagtgaatccggaagtccaagcgccggaggacattctaagccgccccacagccctttagttctcaaacgatgtcacgtgagcacacaccagcataattacgcggccccaccatccactagaaaggactatcccgccgccaagagggtcaagctagatagcgtgcgggtactaagacagatctctaataatagaaaatgcacgagtccaaggtcaagtgacaccgaggagaatgtgaagcgacggacccataatgtgctcgaaaggcaaaggcgaaacgaactcaagcgtagcttttttgcactgcgggatcagatccccgagctagagaacaacgaaaaagcccctaaggtggtcattcttaaaaaggcgactgcctacatcctgagcgtgcaggccgaggaacagaagctgatttctgaagaagacctgctgcgcaagcgcagggagcaactgaagcataagctagaacagctgaggaattcttgtgcc

SEQ ID NO: 21276 - DNA, 1317 bp, synthetic construct; identical to SEQ ID NO: 21275
  misc_feature 1..1317: note = source = /note="Description of Artificial Sequence: Synthetic coding sequence"
  source 1..1317: mol_type = other DNA

SEQ ID NO: 21277 - DNA, 1317 bp, synthetic construct
  misc_feature 1..1317: note = source = /note="Description of Artificial Sequence: Synthetic coding sequence"
  source 1..1317: mol_type = other DNA
atgccgctcaatgtctcatttacgaatcgcaactacgacctggactacgattccgtccaaccgtacttttactgtgacgaagaagaaaacttctatcaacaacagcagcaatccgaactgcagccccctgcaccttcagaagatatttggaaaaagttcgagctgctgccgacgccacctctgagcccgagccggaggtccgggctgtgctcgcctagctacgttgccgtgaccccgtttagcctgcgtggagataacgacggcggaggaggatcgttctccactgcggatcaactggagatggtgaccgaactcctgggaggagacatggtcaaccagtccttcatttgcgaccctgatgacgaaacgttcattaagaacatcatcatccaggactgcatgtggagcggattcagcgcggcagcaaagctggtcagcgaaaagctcgcttcgtatcaagcggcacgcaaagattcaggatccccgaacccggcccgcggacattcggtctgctcaactagctcattgtacctccaagacctgtcagcggctgcatcggagtgtatcgacccatcagtggtgttcccgtacccgctgaacgactcctccagcccgaagtcgtgcgcctcccaggattcgtccgcgtttagcccaagtagcgattcgctgcttagcagcactgaatcgtcgccgcaaggctcacccgaaccattggtcctgcacgaagaaacccctccgaccacttcttccgactcggaagaagagcaggaagatgaagaggagatcgatgtggtttcagtcgagaaacggcaagcaccgggaaagagatctgagtccggatccccatcagcagggggccactccaaaccaccgcacagcccactcgtcctgaagaggtgccacgtgtccacgcaccagcacaattacgcagccccgccgtccaccagaaaagattacccagcggccaagcgcgtgaagctggacagcgtgcgggtcctccgccagatcagcaacaatcggaagtgtacctcgcctcgctctagcgacaccgaggagaatgtcaagagacggacccataatgtgctcgagcggcagcgcaggaacgaactcaaacggtcgttttttgccctgagagatcagatcccagaactcgaaaacaacgaaaaggccccgaaggtcgtgatcctgaagaaggccactgcctacatcctgtcagtccaggcggaagagcagaaactcatctcggaagaggatctgctgcgcaagcggcgggaacagttgaagcataagctggagcaactcagaaattcctgtgct

SEQ ID NO: 21278 - DNA, 1317 bp, synthetic construct; identical to SEQ ID NO: 21277
  misc_feature 1..1317: note = source = /note="Description of Artificial Sequence: Synthetic coding sequence"
  source 1..1317: mol_type = other DNA

SEQ ID NO: 21279 - DNA, 1317 bp, synthetic construct
  misc_feature 1..1317: note = source = /note="Description of Artificial Sequence: Synthetic coding sequence"
  source 1..1317: mol_type = other DNA
atgccactcaatgtaagctttactaatcgcaattatgaccttgactacgactcagttcagccctatttttactgtgatgaagaggagaatttttatcagcagcagcagcagagcgaattgcagcctcctgcccccagcgaagacatctggaaaaagtttgaactgttgcccacacctcccctgagcccttccagacggagtggcctttgttctcctagttatgtcgccgtgacaccgttctcactgcgaggagacaatgatgggggcgggggcagcttcagcactgctgatcagctggagatggtgactgaattgctggggggggatatggtgaaccagtcattcatatgtgatcccgatgacgaaacttttataaagaacatcatcatccaggactgcatgtggagcggcttcagcgctgccgctaagttggtgtctgaaaaactagcttcctatcaggctgcacgtaaagactcagggtcacccaatcccgctagagggcattcagtctgctccacatcctccctttatcttcaggatctgtctgctgccgcaagtgagtgcatcgacccatctgtcgtcttcccatacccgttgaacgattcatccagccctaaaagctgcgcaagccaggatagttcagcttttagtccgagtagcgattccctgctatcctccacagaatcctctccccaaggaagtcctgagcctctagtactgcacgaggagactccccccaccacatcctcagacagtgaagaagagcaggaagatgaggaagaaattgatgtggtgagtgtcgagaagagacaggcccccggtaagagaagtgagagtggtagtccctctgcagggggccactcaaaaccacctcacagccctctggtcttgaagcggtgtcacgtatctacacatcagcataattatgcagcacccccttcaacgcgcaaggattacccggcggcaaagagagtgaaactcgattcggtgagggtcttaaggcaaatctccaacaaccgtaagtgtacatcaccaaggtcctcggatacagaggagaacgttaagcggagaacacacaacgttctggagagacagcgtcgcaacgaactaaaaagatcgttttttgccctccgcgatcagatcccagaactggagaataatgaaaaggcgcccaaggtggtgatcttaaagaaggctactgcttacattcttagcgtgcaggcagaggagcagaagctcataagcgaggaggatcttctgagaaagcgcagggagcagcttaaacacaagctagaacaactcagaaactcctgtgct

SEQ ID NO: 21280 - DNA, 1317 bp, synthetic construct; identical to SEQ ID NO: 21279
  misc_feature 1..1317: note = source = /note="Description of Artificial Sequence: Synthetic coding sequence"
  source 1..1317: mol_type = other DNA

SEQ ID NO: 21281 - DNA, 1317 bp, synthetic construct
  misc_feature 1..1317: note = source = /note="Description of Artificial Sequence: Synthetic coding sequence"
  source 1..1317: mol_type = other DNA
atgcctcttaacgtgagctttaccaatcgaaactacgatcttgactacgactccgttcagccctatttctactgcgatgaagaagaaaacttttaccaacaacaacagcaatcggagctccagcctccggctccatcggaggacatttggaagaagttcgaactcctgcccactcctcctctgtccccatcgcggaggtccggtctgtgttccccatcctacgtggccgtgaccccatttagcctgcgcggagataacgacggtggaggtggctcattctcgactgcggaccaacttgaaatggtgaccgagctgcttgggggtgacatggtcaatcagtcctttatctgcgacccagatgatgaaaccttcatcaaaaacatcattattcaggattgcatgtggtcaggattttccgcagcggcaaagttggtcagcgagaagttggcatcataccaagccgcacgaaaagatagcggttccccgaatcctgcccgcggacacagcgtttgttccacctcatcactttacctgcaagatctctcggcagctgcaagcgaatgtatcgatccgtcggtggtttttccttatccactcaatgattctagctcccctaagagctgcgcgagccaagactcctccgcattttcgccatcatcggatagcctgctttccagcaccgaaagctcccctcagggcagcccggagccgttggtgctccatgaagaaactccgcctacgaccagctcagattcagaagaggaacaagaagatgaggaagagattgacgtggtcagcgtggaaaagagacaggcacctgggaagcgatctgagtcggggtccccctctgccggaggccattcaaagccgccacactctccacttgtgctgaaaagatgtcacgtctcgacccatcagcataactacgcagcgcccccatcgactagaaaggactacccggccgccaagcgggtgaaacttgatagcgtgagagtgctcagacagatcagcaataatcgcaaatgtactagcccgcgaagctccgacaccgaagaaaacgtcaaacgacgtactcataacgtactcgagcggcaaagacgcaacgagcttaagcgatcatttttcgcgctgcgggaccaaatccccgaactggagaacaacgaaaaggcgccaaaggtcgtgattctgaagaaagcaacggcatacatcctttctgtccaggctgaagaacagaagttgattagcgaagaggatcttctgagaaagcgccgtgaacaactcaagcataaactggaacaacttcggaattcctgtgcc

SEQ ID NO: 21282 - DNA, 1317 bp, synthetic construct; identical to SEQ ID NO: 21281
  misc_feature 1..1317: note = source = /note="Description of Artificial Sequence: Synthetic coding sequence"
  source 1..1317: mol_type = other DNA

SEQ ID NO: 21283 - DNA, 1317 bp, synthetic construct
  misc_feature 1..1317: note = source = /note="Description of Artificial Sequence: Synthetic coding sequence"
  source 1..1317: mol_type = other DNA
atgccgctgaacgtgtcgtttaccaaccgcaattacgatctcgattacgatagcgtgcagccttacttttactgtgatgaagaagagaacttttaccaacaacagcagcaatcggaactgcaacctcctgcaccatcagaagatatatggaagaagtttgaacttctgcctacgcctcctctgtcgccttcccgtcgatccggcctttgtagcccaagctatgttgccgtgactcctttttcgctgagaggagataatgacggtggtggtggttcgtttagcactgcggatcagctcgaaatggtgacggaacttctgggtggagatatggtcaatcagagcttcatttgcgatccggacgacgaaacctttatcaagaacattatcatacaggactgtatgtggtctggtttcagcgcggcggctaaattggtgtcggaaaagctcgcctcataccaggcggctagaaaagattcgggttccccgaaccctgcaagaggtcatagcgtctgtagcacttcttccctgtacctgcaagatctttcggcagcagcctcggagtgcattgatccttccgtcgtattcccgtatcctcttaacgactcctcctcccctaaaagctgtgcgagccaggactcctcagcatttagcccgagctcagactctcttctctcctcgactgaaagctccccccagggaagccctgagccacttgtgctccacgaggaaacccctccgactactagttccgatagtgaggaagagcaggaggacgaggaggagatcgatgtggtgtcggtggagaagcggcaagcaccaggtaaacgatcggaatcaggctccccctcggcaggcggccacagcaaaccaccgcatagccctcttgtgctgaagcgttgtcatgtgtccacccaccagcataactacgctgcccctccctcgacccgtaaggactacccagcagcaaaacgggtgaagctcgactccgtgagagtcctgcgacagattagcaacaataggaagtgcacctcccccaggtcatctgataccgaggaaaacgtgaagagacggacccataatgtgcttgaaaggcagcgccgtaacgagcttaaacgctcgttttttgccctgcgcgaccaaattcccgaactggaaaacaacgagaaagcccctaaggtggtcattctgaagaaggcgactgcatacattctgtcggtccaggctgaagaacaaaagttgatctcagaagaggatctgctgcgcaagcggagagaacaactgaagcataaactggaacaacttagaaatagctgtgcc

SEQ ID NO: 21284 - DNA, 1317 bp, synthetic construct; identical to SEQ ID NO: 21283
  misc_feature 1..1317: note = source = /note="Description of Artificial Sequence: Synthetic coding sequence"
  source 1..1317: mol_type = other DNA

SEQ ID NO: 21285 - DNA, 8439 bp, synthetic construct
  misc_feature 1..8439: note = source = /note="Description of Artificial Sequence: Synthetic coding sequence"
  source 1..8439: mol_type = other DNA
atgattccggcccggtttgctggcgttcttctagcactggctctgattctgcctggcacattatgtgctgagggcacaagaggacgatcgtccacagcgagatgctctttattcgggtctgattttgtgaacacgtttgatggcagtatgtatagctttgccggatactgtagctatctgctagccggcggatgccaaaaacgctcattttcaattatcggagattttcagaacggaaaacgagtctcgttgtctgtgtatcttggcgaattttttgatattcatctatttgttaacggcaccgtcactcagggagatcaacgtgtgtcaatgccatatgcgtccaaaggtctgtatctggagacggaggcgggatactacaagcttagtggggaagcctacggattcgtagccagaatcgatggaagcgggaatttccaagttttgttatctgaccgatatttcaataaaacgtgcggcctgtgtggaaattttaatatctttgcggaggacgattttatgacgcaagaagggacattgaccagtgatccctatgatttcgcaaattcttgggcgctttcgagcggagaacaatggtgcgaacgcgcctcccctccgtcgagcagttgcaatatcagttcaggtgaaatgcagaagggactttgggaacaatgccagctccttaaatcaacttcggtttttgcgcgctgtcatcctttagtcgatccggagccgtttgtcgctttatgtgagaaaacgctgtgtgagtgcgccggggggttggaatgcgcctgcccagcgctgcttgaatacgcgcgtacgtgtgcacaggaaggtatggttctttatggttggacggaccacagcgcatgctctccggtttgcccggctggtatggagtaccggcagtgcgtaagcccgtgcgcaaggacatgtcaatctcttcatatcaatgaaatgtgccaggaacgttgcgtcgacggttgttcatgtcctgagggccaactgcttgacgaaggactttgcgtagaatctaccgaatgcccgtgtgtccattctggcaaacggtaccctcccggcacatcactgtcaagagattgtaacacatgtatttgtcgtaattcacagtggatttgtagcaacgaagagtgtccaggagaatgcttggttacgggccaatcacatttcaagtcttttgataaccgctatttcactttctcggggatatgccagtatcttctggcgagagattgccaggaccatagcttttcaattgttattgagacggttcagtgtgctgatgatcgtgatgctgtttgcacgagatctgtcactgtgagactcccaggtcttcataacagcttggtcaaattaaaacatggtgctggagtagcaatggacggacaggacgttcagttgccgttgttgaaaggggatttgcgcattcaacatacagttacagcaagcgtgcggttgtcctatggagaagatcttcagatggactgggatggacgggggcgtctgctggtaaaattgtctccggtctacgctggcaaaacgtgcgggctctgcgggaattataatggcaatcagggcgatgattttctaacgccgtcgggcctggctgagccgagagtggaagactttggtaatgcatggaaactccacggcgactgccaagatctgcagaagcaacatagcgacccatgtgcgttaaatccccgcatgacgcgcttctcagaagaagcctgcgcagttctgacaagcccgacattcgaagcgtgtcatcgggccgtcagtccgcttccgtaccttagaaattgcaggtacgatgtgtgctcatgttcagatggtcgcgaatgcctctgtggcgctttagcttcatacgctgcggcatgtgccggaaggggcgttagagttgcgtggcgagaaccaggacgctgtgaactcaactgcccgaaagggcaggtgtacctacagtgtggtaccccgtgcaacttaacatgcagatcgcttagttacccggacgaggagtgtaacgaagcttgcttggagggatgcttttgtccgccaggcctgtatatggacgaacgtggagattgtgtaccaaaagctcaatgtccgtgttactatgacggggagatctttcaaccagaggacatttttagcgaccatcatacgatgtgttactgcgaagatggattcatgcactgtacaatgtcgggagtgccggggtctcttctccctgatgctgttctttcaagcccactgagccatcgttctaaacgatctctgtcttgtcgtccgcctatggtgaaattagtttgcccggcggataatttgagagcagaaggcttggaatgtactaaaacatgccaaaattatgatcttgaatgcatgtctatgggttgcgtgagtgggtgtctgtgcccaccgggcatggtccgtcatgagaacagatgcgtagcgttagaacgctgcccatgtttccatcagggaaaagaatacgcccctggcgaaacagtgaagattggatgcaatacctgtgtttgccaggatcgcaagtggaactgtacggatcatgtctgtgacgctacttgtagcacaattggaatggcacattacctgacttttgacggacttaaatatctgttcccgggcgaatgtcaatatgtacttgtacaagattattgtggctcaaatccgggcacatttagaatcctagttggtaataaaggatgctcccacccgagtgtaaaatgcaaaaaaagagtcactatcttggtcgaagggggagaaatcgaattatttgatggtgaggtgaacgttaaacggccgatgaaagatgaaacacatttcgaagttgttgagagcggcagatacatcattctccttctgggcaaggcactgtctgtggtttgggataggcatctatctatcagcgtcgttcttaagcagacgtatcaagaaaaggtctgcggtttatgcggcaattttgatggaatccagaacaatgacctgacctcaagcaacctgcaggttgaagaggatccggttgatttcgggaactcgtggaaagtttctagccaatgcgctgacacaagaaaagtacctctggattcgtcaccggctacctgtcataataacattatgaagcagactatggttgattcgtcgtgccgaattcttacatcagacgtctttcaggattgtaacaagcttgtagatccggaaccttacctcgatgtatgcatttatgatacatgctcatgtgaatctattggtgattgtgcttgcttttgcgatacgattgcggcctacgcgcatgtctgtgcccaacatggcaaggtagttacatggagaacagctacactgtgtccacaatcatgcgaagaaagaaaccttcgagagaatggttacgaatgcgaatggaggtataatagctgtgccccggcatgccaggtcacatgccaacacccagaaccgcttgcatgtcctgtgcaatgcgtcgaaggctgccatgcgcattgtccgcctggaaaaatcctggacgaacttttacaaacatgcgtcgacccggaagattgccccgtttgtgaagttgcgggccgccggtttgcgagcggcaaaaaagtcacattgaacccgtcagatcctgagcattgtcagatctgtcattgtgacgtggttaatttaacttgtgaggcttgccaggaaccaggcgggcttgttgtcccccctaccgatgcgcctgtaagcccgacaacactttatgtagaagacatttccgaacctccacttcacgatttctactgctcccggctgctagatttagtatttttactagatggatcatctagactctctgaggcggagtttgaagtcctgaaggcgtttgttgtagacatgatggagcgtcttcggataagccaaaaatgggttcgggtggctgtagtcgaatatcatgatggctctcatgcctatatcggcctgaaagaccgcaaaagaccatccgagctgcggcgaatcgcatctcaggttaaatatgcgggctcccaagtcgcgtccacgtcggaggtgctgaagtatacgctttttcagattttttccaaaatagatcggccggaggcaagtcggatcacacttcttctgatggcctcacaagagcctcaaagaatgagtcgtaattttgtgcgatatgttcaaggcttgaaaaaaaaaaaggtaatcgttattccagtgggcatcggacctcatgcgaatcttaagcagatccggctgatcgaaaaacaagctcctgaaaataaagccttcgttttgagctctgtggacgaacttgaacaacagcgtgacgaaattgtcagctatctttgcgatctcgctccggaggcaccgcctccgacgcttccgccggatatggctcaagtgacagttgggccaggacttttaggagtcagtacactgggtcccaaacggaattctatggtcctagatgtggccttcgtactggaaggatcggataagattggagaggcggattttaatcgctcaaaagaatttatggaggaggtgatccagcgaatggacgtcggccaagattccatacatgtaacggtattgcaatattcttatatggttactgttgagtatccttttagtgaggctcagtcaaagggcgacatcttgcagcgggttcgggaaattcgataccaagggggtaatagaacgaacacgggactcgctctgcgctatttaagcgaccattcattcctggtgtcccagggggatcgtgaacaagcaccgaacttggtatatatggtgactggaaatccggcatcagatgagatcaaacgcctgccgggcgatatccaagtagtacctatcggtgtcggacccaacgccaacgtgcaggaattggaacgtattggttggcctaacgcgccgatattgatccaggactttgagactctccctagggaggcgccggaccttgtgctccagagatgttgcagcggagaaggacttcaaataccgacacttagtcccgcaccagactgttcacagccgttagacgtcattctgcttcttgatggctcctcttcttttcctgctagctatttcgatgagatgaagtctttcgctaaagcgtttatctctaaagcaaacattggccctcggttaacacaggtttcggtcttacagtatggaagtattacgactatcgatgtcccctggaatgtggtgcctgagaaagcgcacttattgtcactggtggatgttatgcagcgcgaaggcggaccgagccagattggcgatgcacttggctttgccgtgagatacctgaccagcgaaatgcatggagcgaggccaggagcatcaaaggcagtcgttatccttgtaacagacgtgtccgtagattcagtggatgccgcggccgatgccgctaggagcaatagagtaaccgtcttcccaatcggcatcggcgatcgttatgacgccgcccaattacgcattcttgcaggcccggcgggtgattcaaatgttgtcaaattgcagcggatcgaagaccttccgactatggtcacacttggcaactcatttttacacaagctttgctccggctttgtcaggatttgcatggatgaagatggtaacgaaaaacgtcctggtgacgtatggacgctcccggatcagtgccatacagtgacgtgccaacccgatggccagacactgttgaaaagccaccgcgttaactgcgaccgtggactgcgacctagctgcccgaactctcaatctcctgtcaaggtggaggagacatgtggatgcaggtggacttgtccttgcgtgtgtaccggatccagcacacgccacatcgtgacttttgacggacaaaatttcaaacttaccggttcttgctcttacgtcttgtttcaaaacaaagaacaagatctcgaagtaattctccataatggcgcttgctctccgggtgcgaggcaaggatgtatgaagagcatcgaagtaaaacattccgcgctgtcggttgaacttcactcagatatggaagtcacagtgaatggaagactggtaagcgtgccttacgtcgggggaaatatggaggttaatgtatatggggctattatgcatgaagtgcgctttaaccacctgggtcacatttttacgttcacaccgcaaaacaacgaatttcagcttcaactctctcctaagacatttgcctcgaaaacttatggcctttgtggtatctgcgatgaaaatggcgcgaacgattttatgttgagagacggtactgtcactacggattggaaaacccttgttcaggagtggacggtccagaggccaggacaaacgtgtcagcctattctggaagaacagtgcttagtacctgatagctcacactgccaggttcttttattaccgttgttcgcggagtgtcataaagttttggctccggctacattttatgctatttgccagcaggattcatgccaccaggaacaggtctgtgaagttattgccagctatgcacacttatgtagaaccaacggcgtttgcgtggattggcgtacaccggatttttgcgccatgagctgtccgccttcccttgtctataaccattgtgaacatggctgtcctagacactgcgatggtaacgtttcgtcttgtggggatcaccctagcgaaggatgcttctgtccgcctgataaagtgatgttagaaggatcatgcgttccggaggaagcctgcacacaatgtattggagaagacggagtccagcatcaattccttgaagcctgggttccagaccaccagccgtgccaaatttgtacgtgtctgagtggccgaaaagttaattgcacaacccagccttgcccaacagccaaggctccgacttgcggactgtgtgaagtcgctcgcctgagacagaatgcagatcagtgttgccccgaatatgaatgtgtttgcgacccggtctcgtgcgaccttccgccggtcccgcactgtgaaagaggtttacagccgacgctgacgaacccgggagaatgtagaccgaactttacatgtgcatgccgcaaagaggaatgcaaaagagtaagcccgccgtcctgccctccgcaccgcttacccacacttagaaagacgcagtgttgcgatgagtacgagtgcgcgtgcaattgtgttaactctactgtgagctgccccttaggctacctggcatcgacagctactaatgactgcggctgtacaactactacatgtctgccggacaaagtttgcgttcacagaagcactatctatcccgtcgggcagttttgggaagagggatgtgatgtctgcacttgcacggatatggaagatgctgttatgggactgcgcgtcgcgcaatgtagtcagaagccttgcgaagattcatgtaggtcagggtttacatatgtcctgcatgaaggggagtgttgtgggcgttgtctgccgtctgcgtgtgaagtcgttacaggatcaccgcgcggggattcccagagttcctggaagagcgtaggctctcaatgggcgtcaccggagaacccatgcctaatcaatgaatgcgttagagtaaaggaagaagtctttatccaacagcgcaacgtctcgtgtccacagttagaggttccagtatgccccagcgggtttcaactttcatgtaagacatcggcttgttgtccttcttgtcgctgcgaacgtatggaggcatgtatgttgaatggaacagttatcggaccgggcaaaacagttatgattgatgtttgtacgacatgtaggtgcatggtccaagtcggcgtgatctctggttttaagttggaatgtcgtaagacgacatgtaacccgtgcccgttgggctataaagaagaaaacaatacaggcgagtgttgcggaagatgtttacccacggcatgcaccatccagttacgtgggggccaaataatgacacttaaacgcgatgagaccttgcaagatggctgcgatacacacttttgcaaagtcaacgaaagaggggagtacttttgggaaaaaagggttaccggatgcccgccgtttgacgaacacaaatgcctggcagaaggtggcaaaattatgaaaataccgggcacttgctgtgatacatgcgaagaaccggaatgcaacgatattacggcacgactgcaatatgtgaaagtcggctcgtgcaaatcagaagttgaggttgatatccattattgtcaaggtaaatgcgcgtctaaagccatgtacagtatagatattaatgacgttcaggaccagtgctcgtgctgctcgccaacccgtacagaaccgatgcaagtcgcattacattgcaccaacggctcagtagtttaccatgaggtcttgaacgcaatggaatgcaaatgttccccgcgcaaatgctctaaa

SEQ ID NO: 21286 - DNA, 8439 bp, synthetic construct
  misc_feature 1..8439: note = source = /note="Description of Artificial Sequence: Synthetic coding sequence"
  source 1..8439: mol_type = other DNA
atgattccggcaaggttcgccggagttctgctggctctggctctcatcctccccgggactctgtgcgcagagggcactagaggcagatctagcaccgccagatgttcattgttcgggtctgacttcgtcaacacctttgacggcagcatgtactcatttgcaggatattgttcttacctgcttgcgggagggtgtcaaaagcgctcctttagcatcataggcgacttccaaaacgggaagagggtgtcactgagcgtatacctgggcgaattctttgatatccatctctttgtcaatggcacagtaacccagggcgatcagagagtttcaatgccctacgcttctaagggtctctatctggaaaccgaagccgggtactataagttgagtggggaggcgtacgggtttgtggctagaattgacggcagcggaaatttccaggtgctgctgagcgatagatacttcaataaaacctgcggattgtgcggcaattttaatatcttcgctgaggatgatttcatgacccaggagggtaccctaactagtgacccgtatgattttgccaattcatgggctctcagctctggtgagcagtggtgcgaaagggcctctcccccgtcgtcttcttgtaacatctcgtcgggggagatgcaaaagggcctttgggagcagtgtcaactgcttaaaagtacaagcgtgtttgccagatgccacccacttgtggatcctgagcctttcgttgccctctgtgagaagaccttatgtgagtgcgctggaggacttgagtgcgcatgccccgctctcctcgagtacgcccggacctgtgctcaggaaggaatggtgctgtacggttggaccgatcactcagcctgttcccccgtgtgtcccgcgggtatggagtatcgtcagtgtgtatcaccttgtgctagaacatgtcagtcactgcacattaacgagatgtgccaggagcggtgcgtggatggttgttcatgtcccgaggggcagctgctggatgaaggcctctgtgtggagtctacagagtgcccatgtgtgcactccggtaagaggtatccccccggaacctcgcttagtcgcgattgtaacacttgtatatgcagaaactcacagtggatttgttccaacgaggagtgcccaggagaatgcttggtcaccgggcaaagccattttaagtctttcgacaatcgatacttcacattcagcggtatctgccagtatctcctggctagggactgtcaggaccattccttctccatcgtgatcgaaacagtgcagtgcgcagatgatcgggatgctgtctgcaccagatcagttacagtgaggttaccagggttgcacaactcactggtgaaattgaagcatggagccggagtagctatggacgggcaggatgtgcaactgccattgctaaagggagacctgcgaattcaacatactgtgaccgctagtgtaaggctgtcttacggtgaagatctccagatggattgggatgggagagggagactgttggtgaagctctcgccagtctacgccggaaagacctgcgggctttgcggtaattacaatggcaaccagggagatgattttctgactccatctggtctcgccgagcccagggtggaagacttcggtaatgcatggaaacttcatggagactgtcaggacctccaaaaacagcattcagatccgtgcgcactaaatcctaggatgactcggttttccgaggaggcttgcgctgtgttaacatctcccactttcgaggcgtgccatcgcgcagtgtccccgttgccctatctgaggaactgtcgatatgacgtctgttcctgctcggacggaagagagtgcctgtgcggtgcacttgcttcctacgccgctgcctgcgccggccgtggcgtcagggtggcttggcgggaacccggaaggtgcgaactgaactgtcccaaggggcaggtgtatctccagtgcggtacaccatgcaacctgacctgtcgctctctttcctacccagacgaagaatgtaacgaagcctgcctggagggctgtttttgcccacctgggctgtacatggatgagcgcggcgattgtgtcccaaaggcgcagtgtccctgttactatgacggagagatctttcagccagaggacatttttagcgaccaccacacaatgtgctactgcgaggacggtttcatgcactgtaccatgtctggagtaccaggatccctgttgcccgatgccgtgctgagcagtccactgtcgcaccgttcaaaacgcagtctttcctgtagacctccgatggtgaagctggtgtgccccgcagataatttaagagctgagggcttagaatgtacgaaaacctgccagaactatgatctggaatgtatgagcatgggttgtgtcagtgggtgcctgtgcccgcccggcatggtgcgacatgaaaatcgatgtgtcgccctagagcggtgcccttgcttccatcagggaaaggagtacgcacccggggagactgttaagatagggtgcaatacttgtgtgtgtcaggaccgaaagtggaattgcaccgaccacgtttgcgacgctacctgttccactataggcatggcacattacttgaccttcgacggccttaagtatctcttccccggcgagtgtcagtacgttctcgttcaggactactgcgggtctaatcctggaaccttcagaattttagtaggcaacaaggggtgttcacacccatccgtcaagtgcaagaaaagagtaacaatactggttgagggaggagagattgagctgttcgacggggaagtgaacgtaaagcgtcccatgaaggacgaaactcacttcgaggtggtagagtccgggagatatatcattcttctcctaggtaaagccctgtccgtggtctgggacaggcatctctctatcagtgtggtgttaaagcagacttatcaagaaaaggtgtgcgggctgtgtgggaactttgatgggattcagaacaatgacctgacaagctcaaatttgcaggttgaggaggatcccgttgattttggcaattcatggaaagtgtctagccagtgtgctgatacaaggaaagtcccacttgacagctccccagcaacctgccacaacaatattatgaaacagactatggttgacagcagttgcaggatcctcacatctgatgtgtttcaggattgtaataaactggtggatccagagccgtatctagatgtctgtatttacgacacatgctcgtgtgagtcaataggcgattgcgcatgtttctgtgacaccatagcagcttacgcccacgtgtgcgcgcaacacggtaaggtggtgacgtggaggacggcaacattatgtccccagtcatgtgaagagaggaatttgcgcgaaaacgggtatgaatgcgagtggcgttacaacagttgtgctccagcatgtcaggtgacttgtcagcaccctgagccactggcttgtcccgtgcaatgtgtggaaggctgtcatgcccactgcccacctgggaaaattcttgacgagctgctgcagacctgtgtggaccccgaggactgccctgtgtgtgaagtggccggtcggaggttcgcgtcaggaaaaaaggtgacattgaaccccagtgatcccgagcactgtcagatctgtcactgtgacgtggtgaatctcacttgcgaagcctgtcaagagccaggaggcctagtcgtcccgcccaccgacgctccagtgtctccaactactctttacgtagaagatatctccgaacccccactccatgatttttattgctcacgcctcctcgatctcgtgtttttactggacgggtccagccgactgtcagaagccgagtttgaagttctgaaggcgttcgtggtcgatatgatggaaagacttcgcatatcacagaaatgggttcgcgtggcagttgtggagtaccatgatgggtcccatgcctacataggccttaaggatagaaagcgcccatcagaactcaggcgtattgcctctcaggtaaagtatgccggctcccaggtggcctctacctctgaggtcctgaaatacacactttttcagattttctccaagattgataggcccgaggcatcccggatcaccctgctgttgatggcttcacaggagccgcagaggatgagtaggaacttcgttcgatatgtacagggcctgaaaaagaaaaaggtgatcgtcattccagtgggaataggcccccacgcaaatttaaagcagatccggctgattgagaaacaggctccagagaataaggcgtttgtactatcttctgtggatgagctagaacagcaacgagatgagatcgtctcgtatctgtgcgaccttgcgcctgaagcccccccccctaccctgcccccagatatggcccaggtaaccgtggggccaggcttactgggggtgtcaactcttggtccgaagaggaactctatggtcttggatgtggccttcgtgctcgagggatcagacaaaattggtgaggcggactttaaccggtccaaggaatttatggaggaagtgatccaaaggatggatgtcggccaggactccattcatgttaccgttttacaatactcctacatggtcacagtggagtacccttttagcgaagcccagtctaaaggcgatatcttgcagagggtgagagagatcagatatcagggcggaaatcggaccaatactgggctggccttgcgttatctttctgatcattcatttctcgtgagccagggcgatcgtgagcaggcacctaatctagtgtatatggttacaggaaatcccgcatccgacgagattaagaggttgccgggagatatccaagtcgtccccatcggcgtggggcccaacgccaatgtgcaggaactggagcggatcggctggcccaatgcgccgatcctcattcaggatttcgagactcttccccgggaagctcccgatctggttttgcagcgttgctgcagcggggaaggcctgcagatccctacgctgtctcctgcgcctgactgttcccagcccctcgatgtgattttattattggacggctccagcagttttccagcaagctactttgacgaaatgaagtctttcgctaaagcctttatctctaaggccaatatcggcccacgcctcacccaggtcagtgtactccagtacgggagcatcactacgatcgatgtgccatggaacgttgtaccagagaaggcacatctcctgagcttggtggatgtgatgcagagggagggggggccgagccagataggggacgcactgggattcgctgtcagatacctgacaagcgaaatgcatggtgctcggccgggagctagcaaggccgtcgtaattctggtcacggacgtctcagtggacagcgtggatgccgctgcggatgccgcacggagcaaccgggtgaccgtgtttccaattggcatcggtgaccgatacgacgccgcacagttgcggattctcgctgggccggctggcgactccaatgtcgtgaagttacagcgcattgaagatctgcccacaatggtaactttgggtaattcgttcttgcacaaactgtgtagtgggtttgtgaggatctgcatggatgaggacggcaatgaaaagcgccccggcgacgtctggaccctccccgaccagtgccatacggtaacctgtcagccagatggccagacactgctgaaatcccaccgggtaaattgtgatcggggactccgcccctcgtgtcctaatagccagagcccggtcaaggtcgaagaaacatgtgggtgcagatggacctgcccatgcgtgtgcaccggtagctctaccagacacatcgttacatttgatggccagaattttaaactaactgggtcatgctcctatgtgctgtttcagaataaggagcaagaccttgaggtgatcctgcacaatggggcgtgctcacctggcgcccgacaggggtgcatgaaatccatcgaagtgaagcattcagctctctccgtagagttgcacagcgacatggaggtgaccgtcaacggtagacttgtgtccgtcccctatgttggtggcaacatggaggtgaatgtttatggcgctattatgcacgaggtgcggttcaatcacttgggtcacatattcacattcactccccagaacaacgaatttcaactccaattgagccctaagacatttgcttctaagacgtatggcttatgtggaatttgtgacgagaacggggcaaatgacttcatgctgagagacggcacggtgactacagattggaaaactttagttcaggagtggaccgtgcagcgacccggccagacttgtcagcccatcctagaagagcagtgcctagtgccggactcaagccattgtcaagtcctgttactgcccttgttcgccgaatgccacaaagtactggcgcctgcgacattttatgccatttgccagcaggattcctgccatcaggagcaggtttgcgaggttatcgcatcatatgcgcacctttgcagaactaacggcgtgtgtgtggactggcgtacacctgacttctgcgctatgtcctgtccacctagcctcgtgtataatcattgcgagcatgggtgcccccggcactgtgatggaaacgtttcttcctgtggggaccatccatcagaaggttgtttttgcccccccgacaaggtcatgttggaggggtcctgcgtccctgaagaggcatgtactcaatgtataggagaagatggcgttcagcatcagtttttggaggcgtgggttcccgaccatcaaccttgccaaatctgtacctgcttgagcgggcgcaaggtgaattgtacgacgcagccctgcccaacagcaaaagcccctacttgtggcctgtgtgaagtggccaggctacggcagaacgccgatcagtgctgcccggaatatgagtgcgtttgcgacccagtttcatgcgacttaccgcccgtgcctcattgtgaacgtggtctacaaccaactttgactaatcccggagagtgcagaccgaattttacctgcgcatgccggaaggaagaatgtaaacgggtttcaccacccagctgtccgccccacaggctgcccaccctgcggaagacacagtgttgcgatgaatatgagtgtgcctgtaattgtgttaattccacagtgagttgtcctctcggctatctggcgagtacggccacaaacgactgtggatgcacaactactacatgtcttccggacaaagtgtgtgtgcacagatccacgatctaccctgtcggccagttctgggaggagggctgcgacgtgtgtacctgcaccgatatggaggacgccgtaatgggcctgcgcgtggcccaatgctcccagaagccgtgcgaagatagctgtcgatcaggctttacttacgttctgcacgaaggcgagtgctgcggtcgatgcctgccaagcgcatgtgaggtagtcacaggctctccacgaggtgacagccagtcatcatggaagtcagtcgggagtcagtgggcctcaccagagaacccatgcctgatcaatgagtgtgtaagggtgaaagaggaagtgttcattcagcagcggaacgtttcttgtcctcagctagaggtgccagtctgtcctagcgggtttcagctgagctgcaaaaccagcgcctgttgtccttcgtgtagatgcgagagaatggaagcatgtatgctgaatggcactgtcatcggcccggggaagaccgtgatgattgacgtgtgtaccacttgccgctgtatggtgcaggtgggcgtaattagtgggtttaaactggagtgtcggaaaaccacatgtaatccgtgtccactgggctacaaagaggaaaacaatactggtgagtgttgtggaaggtgcttaccaacagcctgcacgattcagttacgtggcggccaaatcatgacacttaagagagacgagaccctgcaggatgggtgcgacacccacttctgcaaagtcaatgagcggggtgagtacttctgggagaaacgcgtcaccggttgccccccatttgacgagcacaaatgcctagctgaaggcggaaaaatcatgaagatacctggaacctgttgcgatacctgcgaggagcctgaatgcaacgacattacggccaggctgcaatatgtgaaggtgggttcctgcaagtccgaagtggaggtggacatccattattgccagggcaagtgcgcctcgaaggccatgtactcgattgatattaatgacgtgcaggatcagtgctcctgctgctcgcctaccagaacggaacctatgcaagtggctctgcactgtactaatggatccgtggtgtaccacgaggtcctgaacgcaatggagtgcaagtgctccccacgcaagtgtagcaag

SEQ ID NO: 21287 - DNA, 8439 bp, synthetic construct
  misc_feature 1..8439: note = source = /note="Description of Artificial Sequence: Synthetic coding sequence"
  source 1..8439: mol_type = other DNA
atgattcctgcacggtttgctggagtgctactagcattagcactcattttgccggggaccctttgtgctgaagggacacgcggccggtcttctacagccaggtgctcgctgtttggctcagatttcgttaacacctttgacggaagcatgtactcattcgccggatactgctcctatctcctcgcagggggctgccagaagaggtctttcagcattattggggatttccagaacggcaagcgtgtgagcctgtcagtgtatctcggtgagttcttcgacattcatctattcgttaatgggaccgtgacacagggggaccagcgggtatccatgccctacgcatccaagggcctctacctggaaacagaggcaggctactataaactgagcggggaagcatatggattcgtggctcgtattgacggctctggcaattttcaagtgttgctgtccgatcggtattttaacaaaacgtgcgggctttgtgggaacttcaacatcttcgctgaggatgattttatgactcaggagggcaccctgacttccgacccctatgattttgcaaactcatgggctctctcctctggagagcagtggtgtgaaagagccagccccccgtcaagtagctgtaatattagtagtggcgaaatgcagaagggtctatgggagcagtgccagcttctcaaatccacaagtgtgttcgcccgctgccacccacttgtcgaccctgagccttttgtggctctctgcgagaaaacactctgcgagtgtgcagggggcctagagtgtgcctgtccggccttgctggagtacgctaggacctgcgcgcaggagggtatggtgttatatggctggacagatcatagcgcatgttcccccgtgtgtcctgctggcatggagtatcgtcagtgtgtttcaccctgcgcaagaacgtgccagtccctccacattaatgagatgtgccaagagcggtgcgttgatggctgctcctgtcccgaggggcaactgcttgatgagggcctttgtgtggaatccaccgagtgcccatgcgtgcactcgggaaaacgatatcccccgggcacgagccttagccgcgactgcaatacatgcatttgccgtaactcacaatggatctgctcaaatgaggaatgccccggggagtgtttggtaactggccagtcacattttaagagttttgacaaccggtacttcactttctctggaatctgtcagtatttgctggccagagactgtcaggaccactccttcagtattgtgatcgagacagtgcagtgcgctgatgatcgtgacgccgtatgcacccgatctgtcaccgtccgactgcccggccttcacaattcgctggtgaaattaaaacacggggcaggcgtcgccatggacgggcaggatgtacaactgcccctgctcaagggggacttacgaattcagcacaccgtgaccgcctctgtacggctaagctacggcgaggacctgcagatggactgggacggccgtggacggctcctggtgaaactgagcccggtgtatgctgggaaaacctgtgggctctgcgggaattataatggcaaccagggggatgatttcttgacaccttcaggcctcgctgagccacgggttgaagactttgggaatgcctggaagttgcacggtgactgccaggatttacagaaacagcactccgatccctgcgctttgaaccctagaatgactaggttctcagaagaagcatgcgcagtcctgacctcacccacattcgaagcctgccacagggccgtgtctccacttccataccttcgaaattgcaggtatgacgtttgctcttgcagcgacgggcgggaatgcctgtgtggtgcattggcgtcatatgccgctgcgtgtgcagggcgcggcgtgcgggttgcctggagagagccagggagatgtgagctgaattgtccaaaggggcaggtgtatttgcagtgtggcactccgtgcaatctcacatgtcgcagcttatcttaccccgatgaggagtgcaacgaggcttgcttggaaggatgtttctgcccacctggtctgtacatggacgaacggggggactgcgtacccaaggctcagtgtccttgctattatgatggtgagatctttcaaccagaggatatattctcagaccatcacacaatgtgctattgtgaggacgggtttatgcactgtacgatgtcgggtgtgcccggatctcttttgcccgatgctgttctttcttctcctctgtcccatcgttccaagagaagcttaagctgccggccaccaatggttaagctcgtgtgtcctgcggacaacttacgggcggaggggctagaatgcacaaaaacatgccaaaactacgacctggagtgcatgagtatgggctgcgtgtctggatgcttgtgtccccctgggatggtgaggcatgagaacagatgcgttgcgctcgagaggtgtccctgtttccatcaaggcaaggagtacgctcccggcgaaacagtcaagatagggtgcaacacgtgcgtgtgtcaggaccggaaatggaattgtactgaccatgtttgtgatgccacatgtagcacgatcggtatggctcactatctgactttcgatgggctcaagtatctctttccgggtgagtgtcagtacgtcttggtgcaggactactgcggctccaacccagggaccttccggattcttgttggtaacaagggttgcagccacccatccgtaaaatgcaagaaaagggtaaccatcctagtggaaggtggggaaatagaactgtttgacggtgaagtaaacgtcaagagacctatgaaggatgaaacccacttcgaagttgtggagagtggcaggtatattattctcttgttaggaaaagccctatctgttgtgtgggacaggcatctctccatatctgtggtgctgaagcagacctatcaggagaaggtctgcggcctctgcgggaattttgatggtatccagaacaacgacctgacctcatccaatttgcaggtggaagaggatcccgtggatttcgggaactcctggaaggtttcgtcccagtgtgccgacacacgaaaggtaccactcgatagtagtcccgccacctgtcacaacaacattatgaaacagaccatggttgatagcagctgcagaattttgacgagcgatgtttttcaagactgtaataagttggtggaccccgagccctacttagacgtatgtatctacgacacctgcagttgcgagtccatcggcgactgcgcctgtttctgcgacaccattgctgcatatgcccacgtgtgcgctcagcatggaaaagtggtgacatggcgaactgccacactctgtcctcagagctgtgaggaacggaacctcagggaaaacgggtatgagtgcgagtggagatacaacagctgtgcacctgcatgtcaggtcacttgccagcacccggagcctctcgcctgtccggtccagtgcgtggagggctgtcatgcccattgcccaccaggtaagatcttggacgaactgctgcagacctgtgtggacccagaagactgccctgtgtgtgaagtggccggcaggagattcgcctctggcaagaaagtcactctaaacccttccgaccctgaacactgccagatttgccactgtgatgttgtgaatcttacgtgcgaggcatgtcaggaaccgggcggacttgtcgttcctccgacagacgcccctgtgagcccaaccacattatacgtggaagatatttcggagcctccattacacgatttttattgttctcgactattagaccttgtctttcttctggatggatccagccgcttatctgaagcggagttcgaagtcctgaaggcattcgtggtggatatgatggaaaggcttaggatctctcagaaatgggttcgagtggccgtagtcgaatatcacgacgggagccacgcttacattggattgaaagaccgcaagcgcccatctgagctgagacgaatcgccagccaggtgaaatatgctggatctcaggtagcatccacctctgaagtcttgaagtatacactctttcaaatcttctctaaaatcgaccgcccagaggcatctagaattacgctcctcctgatggctagtcaggagccgcagcgaatgtccagaaatttcgtgaggtacgtacagggcctgaagaaaaagaaggtaattgtgattcccgtgggtatcggtcctcacgccaatttgaagcaaattcggcttatagagaagcaggcaccggagaataaagcgtttgtgctgagcagcgtggatgagcttgagcagcagcgggacgaaattgtcagctatttatgcgacctcgccccagaggctccacctccgaccctaccccccgacatggcccaggttacagttgggccaggtctactgggagtgtcaacgctggggcctaagcgtaattcgatggttttggacgtggcttttgttttagagggtagtgacaaaatcggagaggcagatttcaaccgctctaaggaattcatggaggaagttatacagaggatggacgtgggccaggactccatacacgtgaccgtgctacagtatagctacatggttactgtggagtaccccttttccgaagcgcagagtaagggcgatattctccagcgcgtcagagaaatcagataccagggtgggaataggacaaatacaggattagctcttcgctatctgtctgatcactctttcctggtcagccaaggcgacagagaacaggcgccaaatctcgtctacatggtgacaggaaacccagcttctgacgaaattaagagactgccaggggacatccaggttgtaccgatcggggtgggacctaacgctaacgtccaggagttagagcgaataggatggccaaatgctcccatattgatccaggatttcgaaacactgccacgagaggcccctgatctggtactacaaaggtgctgttctggggagggcctgcagatcccaacgctgagtcccgctcctgattgcagtcagcccctcgatgttatcttgttgttggacggctcgagcagtttccccgcgtcctattttgacgaaatgaagtcattcgccaaggcgttcatctccaaggcgaatatagggccacgtctgactcaggtgtcagtgctacagtacgggtcaatcacgaccatagacgtgccctggaatgtcgttcctgagaaggctcatctgctttccctagttgacgtgatgcagcgagagggaggtccaagtcagatcggtgatgctctgggcttcgccgtcaggtatctgactagtgagatgcacggggcaaggccaggggcaagtaaggccgtggtgatcctggtgacagatgtttcagtcgactccgtagatgccgcggccgacgccgctagatctaatagggtgactgtctttcctatagggattggggaccggtatgacgccgcccagctgaggatcctagcaggtccagcaggcgattcgaatgtcgtaaagttgcagagaattgaggacttgcccacaatggttactctggggaactctttccttcacaagctctgctctggctttgtcaggatctgtatggacgaggatgggaacgaaaagaggccaggcgacgtgtggactttacccgatcagtgtcataccgtgacttgtcagccagacggacaaacgctcctgaaatcccaccgagtcaactgtgacaggggactgcgcccaagctgccccaatagccagtcccccgttaaagtcgaagaaacctgcgggtgtcgctggacctgtccatgtgtctgcactggaagctctacacggcacatcgtcaccttcgacggccaaaattttaagcttacaggaagctgttcctacgttctgttccagaataaagagcaggatctggaggtgattctgcataatggagcttgttctccaggtgctaggcaaggatgcatgaaatccattgaggttaaacactcagctctttccgtggagctgcattcggatatggaggtaaccgtgaatggccgtctagtgtccgtgccctacgtaggagggaacatggaggttaatgtgtacggggccattatgcatgaagttaggtttaatcacctgggtcacatcttcactttcacccctcagaacaacgagttccagctccagctgagtcctaaaacttttgcctccaagacttacggattgtgcggaatctgtgacgagaacggtgccaacgattttatgctgcgggatgggactgtgaccacagattggaaaacccttgttcaagagtggacagttcaacgtccagggcaaacgtgccagccaatcctggaggagcagtgtctcgtccctgattcatcccactgccaggtcctgctgttgcccctgtttgctgaatgccacaaagtgctggctccagcaactttctacgccatctgccagcaggatagctgccatcaggagcaggtatgcgaggttatcgctagctatgcccatctctgccgcactaacggcgtgtgcgtggattggcgcacacccgacttctgcgccatgtcatgccccccctctctggtatataatcattgtgagcacggttgccctcggcattgcgatggcaacgtgtctagttgcggggaccacccatctgagggctgcttttgcccacccgacaaggtgatgctggagggaagttgcgttcctgaggaggcttgcacccagtgcatcggggaagatggcgtccagcatcagtttttggaagcatgggttcctgaccatcagccatgccagatctgtacatgcctctctggtagaaaggtgaactgtaccactcagccctgtcccacagccaaggctcccacctgtggattatgcgaggttgctagactgcgccagaatgccgaccaatgctgccccgaatacgagtgcgtgtgtgatcccgtatcatgtgatttacccccagtccctcactgcgagcggggactgcaaccgactctgacaaacccgggcgaatgtcgcccaaacttcacatgtgcctgtaggaaggaagagtgcaagagagtgagtccgcctagctgtcccccccaccggctgcctacacttagaaaaacacagtgttgcgacgagtacgagtgtgcctgtaactgcgtaaactctactgtgagctgtccgctgggctacttggcttcgacagctacaaacgactgtggctgtaccaccaccacttgcttgccggacaaagtgtgcgtccatcggagcacaatataccccgtcggacaattctgggaggaaggttgcgacgtgtgcacctgtactgatatggaggatgctgtcatgggcctgcgagttgcccaatgtagtcaaaagccctgcgaggattcctgcagaagtggcttcacatacgtgcttcacgagggcgagtgctgtggccgttgcctgcccagcgcttgcgaagtcgtaaccggaagccctagaggggactctcagtccagctggaagtcagtgggctcacagtgggcctctcctgaaaatccatgtttgattaacgaatgtgttagggtcaaggaggaggtgtttattcagcagaggaatgtgtcttgtccgcagctcgaggtgccagtttgcccctccggttttcaattgagttgcaagactagcgcgtgctgcccatcctgcagatgcgagcgcatggaggcttgcatgctgaatggcacagtcattggccctggaaagactgttatgatcgacgtttgtacaacctgccggtgtatggtacaagtgggggtaatctctggtttcaagcttgagtgtcgcaagactacatgtaatccttgtccgctggggtacaaagaggagaataatacaggagagtgttgcggccgatgtctacccaccgcctgcaccatccagctaaggggtggccaaattatgactcttaaaagggatgagactctacaagatgggtgcgatacacatttttgtaaggttaatgaacgaggagaatacttttgggagaagagggttaccggctgccccccgttcgacgaacacaaatgtctggcagaggggggtaaaatcatgaagatcccgggcacctgctgcgacacctgtgaagaaccagagtgcaacgacattaccgctaggctccagtacgtcaaagtgggctcctgtaagtcggaggttgaagtggatatacattactgtcagggcaagtgcgcgtctaaggccatgtacagcatcgatatcaacgatgtgcaagaccaatgtagttgttgttctcctacacgcactgaaccaatgcaggtcgccctccactgcaccaacgggtcagtggtttatcatgaggtgctgaatgccatggagtgcaagtgttccccgcggaaatgcagtaag

SEQ ID NO: 21288 - DNA, 8439 bp, synthetic construct
  misc_feature 1..8439: note = source = /note="Description of Artificial Sequence: Synthetic coding sequence"
  source 1..8439: mol_type = other DNA
atgattccagcacgatttgcaggcgttcttcttgcactggccctgattctgcccggtaccctgtgcgcagaaggaacccggggaagaagctctaccgcaagatgttcactgttcggttccgattttgtgaacacctttgatggatcgatgtacagctttgcagggtactgttcctaccttctggctggaggatgtcagaagagatcgttcagcattattggtgatttccagaacggcaagcgggtgtctctgtcagtgtacttgggtgaattcttcgatattcatctttttgttaacggaacggtgacccaaggggaccagcgcgtctcgatgccttacgcatccaagggactgtacctggaaaccgaagcaggttactacaaactgtcgggtgaggcatacgggtttgtcgcgcgcatcgacggtagcggaaacttccaagtgctgctctccgaccgatactttaacaaaacgtgcggtctttgtggtaacttcaatatcttcgccgaagatgatttcatgactcaagaaggcaccttgacctccgatccctacgatttcgcaaattcctgggcgcttagctccggtgaacaatggtgcgaacgcgcaagccctccatcatcgagctgtaacattagctcgggtgaaatgcaaaaaggcctttgggagcaatgccagctcctgaagtccacttcagtctttgcacgttgtcatcccctggtcgacccagagccctttgtggcactgtgtgaaaaaactctgtgtgaatgtgcaggcgggctcgaatgtgcgtgtccagcactgctggagtacgcgcgaacgtgtgcacaagagggcatggtgctttacggatggacggatcactcagcatgcagccctgtgtgtcccgcaggtatggaatacagacaatgtgtgtcaccatgtgcacgtacgtgtcaatccttgcacatcaacgagatgtgccaagagcgatgtgtggacggttgtagctgtcctgaaggccaactgcttgatgagggactttgcgtggaatccactgagtgcccatgtgtccattccggtaagcgttacccgcccggcacctcactgtcccgagactgtaatacctgtatctgcaggaactcacaatggatctgcagcaacgaggagtgtcccggagaatgcctcgtgaccggtcaatcccacttcaagagctttgataacagatacttcacctttagcggtatttgtcaataccttctggcacgggattgccaggaccattccttttcgattgtcattgaaacggtgcagtgtgcagatgacagagatgcggtgtgtaccaggagcgtgaccgtgcgcctgcccggtttgcataattcgcttgtcaaactgaaacatggcgctggagtggccatggacggtcaagacgtccaattgccactgcttaagggggatctgcggattcagcacactgtgaccgcgtcagtgagactcagctacggagaagatctgcaaatggactgggatggaagaggccgccttctggtcaagctctcaccggtgtacgctggaaagacgtgcggactttgcggaaactacaatggtaatcagggggatgattttctgactccatcgggcctggccgaacctcgggtcgaggactttggaaacgcttggaagctccatggagattgtcaagaccttcaaaagcaacactccgacccctgcgctcttaaccccagaatgaccagattttcggaagaagcatgtgctgtgctcacctcccctaccttcgaggcatgtcatagagcagtgtctcctctgccgtacttgagaaactgtagatacgacgtctgctcgtgttccgacggccgggagtgcctttgtggagccctcgcatcatacgcggccgcatgcgcgggacgaggcgtgcgagtggcatggcgggaacctggaagatgcgaactgaactgtccaaagggacaggtctatttgcaatgtgggactccatgcaaccttacttgcagatctcttagctacccggacgaagaatgcaacgaagcctgtctcgagggatgtttttgtcctccagggctttacatggacgaacgtggtgactgtgtgccaaaggcacaatgtccgtgttactatgatggagagatttttcaaccagaggacattttctccgatcatcacaccatgtgttactgtgaagatggcttcatgcactgtactatgtcaggagtgcccggatcccttctcccagatgcagtgctctccagccccctttcacatcgatccaaaagatcgctgtcatgccggccccctatggtcaagctggtgtgccccgcagataatcttagggcagaaggcctggaatgcaccaagacttgtcaaaactacgatctcgaatgtatgtccatgggatgtgtctcaggatgtctctgccctccagggatggtccggcatgaaaatagatgcgtggcgttggagaggtgcccctgtttccaccagggtaaggagtacgctccaggcgaaactgtgaagattggttgcaatacttgcgtgtgccaagatcgtaaatggaactgtaccgatcacgtgtgtgatgcgacctgttcgaccatcggtatggcccattaccttacttttgacggtctgaaataccttttccctggggaatgtcagtacgtcctcgtgcaagattactgtgggagcaatccgggtactttcagaatcttggtgggaaacaagggttgttcacatcctagcgtgaagtgtaaaaagcgtgtgactattctggtggagggaggagaaattgagctttttgacggagaagtgaatgtgaagaggcctatgaaggacgaaacccattttgaggtcgtggaatctggtcggtacatcattcttcttctcggcaaggcactctccgtggtctgggatcgccatctctccatttccgtcgtccttaaacaaacctaccaggaaaaggtgtgcgggctttgcggtaactttgatggcatccaaaacaacgaccttacgagctcaaacctccaggtggaggaagatccagtggactttggcaactcttggaaggtgagctcccaatgcgcagatacgcgaaaagtcccactggattcgtcccccgctacttgtcacaacaacatcatgaagcaaacgatggtcgactcgtcgtgtagaattctcacttccgacgtgtttcaggattgtaacaaacttgtggaccctgaaccttaccttgatgtgtgtatctacgacacctgcagctgcgaatcaatcggggactgcgcctgcttttgtgacaccatcgccgcatatgcacatgtctgtgcacagcacgggaaggtggtcacttggcggaccgcaaccctctgtccacaaagctgtgaagaaagaaacctgcgcgaaaatggttacgaatgtgaatggcggtacaattcctgtgcacccgcctgtcaggtgacctgtcaacatcccgaacctctcgcctgcccagtccaatgtgtcgagggatgccacgcccattgtcctcctggcaagatccttgacgagttgcttcagacctgcgtcgatcctgaagattgtccggtctgtgaagtcgccggcagacgctttgcgtccgggaagaaagtgactctgaacccgtcagacccagaacattgccagatttgtcattgtgacgtcgtgaacctcacttgtgaagcctgccaagagccaggcggtcttgtggtgccaccaaccgacgcgccagtgtcgccgaccactctgtatgtggaggatatttcggagcctcctcttcacgacttttactgttcacgcctgcttgacttggtctttctgttggatggttcaagccggctctccgaggcagaatttgaagtgttgaaggcctttgtggtcgatatgatggagcgacttagaatttcgcaaaagtgggtgcgcgttgcggtggtggagtaccacgatggttcgcatgcctatatcggactgaaagatcgaaaacgcccttcggaacttcgccgtattgcatcacaagtgaaatacgcaggcagccaggtggcaagcaccagcgaagtccttaagtacaccctgtttcaaatcttttcaaagatcgacagacctgaagcctctcgtattactctgcttctcatggcctcccaggaaccgcaaaggatgtcccgtaactttgtgaggtacgtgcaggggctgaaaaagaagaaggtgatcgtgatcccagtgggtattggtcctcatgcaaacctgaaacagattaggcttattgaaaaacaagcacctgagaacaaagcctttgtgctgtcctccgtggatgagcttgaacagcaacgggatgaaatcgtgtcatacctctgcgatcttgcaccggaagcaccgccaccaacccttcctccagacatggcccaagtgactgtgggaccaggactgttgggtgtgtcaactcttggaccaaagcgcaactctatggtgctggacgtggcgtttgtgcttgaagggagtgacaaaattggtgaggcagactttaacaggtccaaggaattcatggaagaagtgattcaacggatggatgtgggacaagacagcattcatgtcaccgtccttcaatacagctacatggtgaccgtggaataccccttcagcgaagctcagtcgaagggtgatattctccagcgggtcagggaaattagataccaaggggggaaccgcactaacactggccttgccctgcgctacctgagcgaccatagctttcttgtgagccagggggatcgggaacaggctcctaacctggtgtacatggtgacgggaaatcccgcatccgacgagattaagagactccctggtgatatccaggttgtgcccataggggtgggacctaacgcaaacgttcaagagcttgaaaggattggatggcccaacgcacctatccttatccaagactttgaaaccctgcctcgagaggcacctgatcttgtcttgcaacgctgttgttccggagaaggactgcaaattcctaccctgtcgccagctccagattgctcacaaccactcgatgtcatactcctgctcgatggatcatctagctttcctgcatcgtattttgatgagatgaaatcgtttgcgaaggcattcatttcgaaggctaacattggtcctaggctcacgcaagtgtcagtcctgcaatacggatccattaccaccatcgatgtgccctggaacgtggtgcctgaaaaggcccatcttctgtccctcgtcgatgtgatgcagcgggaaggaggtccttcacagataggggatgcgcttggttttgcagtgcgctacctcacctcggagatgcacggcgcacggccgggtgcatcgaaggccgtcgtgatcctggttaccgatgtttccgttgactcggtggacgccgcagcagatgcagccaggtccaaccgtgtcactgtgttcccaataggtattggtgaccggtacgatgcagcacaacttcgaatccttgcaggtcctgccggggatagcaacgtcgtgaaacttcagcgtattgaagatctgcctaccatggtcacccttgggaactcctttttgcataagttgtgttcaggatttgtgcggatatgtatggatgaggatggaaacgaaaaaagacccggtgatgtgtggactctgcccgaccagtgtcataccgttacttgtcagcccgacggccaaacccttcttaaatcgcatcgggtgaactgtgaccgggggctgcgaccctcatgtccgaactcacaatcacctgtgaaagtagaagagacttgtgggtgcagatggacctgcccatgtgtgtgtacgggatcctcgaccagacacattgtcaccttcgatggacaaaacttcaagctcaccggatcctgctcgtacgtgctgtttcaaaacaaagaacaggatctggaggtaatacttcacaatggcgcatgttcgcctggcgccagacaaggctgtatgaaatccattgaggtgaaacattcggctctttccgtcgaactgcattccgatatggaagtgaccgtgaatggtcggctcgtgagcgtgccttacgtggggggtaatatggaggtcaatgtctacggcgcaatcatgcacgaagtcagatttaaccaccttggacacatattcacttttaccccgcagaacaacgaatttcaacttcaactctcgccaaagacctttgcatctaagacctacggattgtgcggtatttgtgatgagaacggtgcaaatgatttcatgctgcgcgacggaaccgtgactaccgactggaaaactttggtgcaggaatggacggtgcagcgccctggccaaacgtgccaacccatcttggaagaacaatgcctcgtgcctgattccagccactgccaggtgctgcttctgcccctttttgcagaatgccataaagtgcttgcacctgccaccttctacgcaatatgtcagcaagactcatgtcaccaagaacaggtgtgtgaggtgatagcctcatacgcacacctttgcagaacgaacggagtctgtgtggactggagaaccccggatttttgtgcaatgtcctgtcctccttcccttgtgtacaaccattgtgagcatggttgtccaaggcattgtgatggaaatgtctcttcatgtggcgaccacccctccgaaggatgtttttgcccaccggataaggtgatgttggagggctcatgtgtgcccgaggaggcttgcacgcagtgcattggggaagatggggtgcagcaccagtttctggaagcctgggttcctgaccatcagccatgtcagatttgtacttgcctgtcgggacgcaaggtcaactgtactacccaaccatgtcctactgcaaaggcaccaacctgtggcctttgcgaagtggcaagactgagacaaaacgcagatcagtgttgccctgaatacgaatgtgtgtgcgatcctgtatcctgcgacctccccccagtgcctcactgtgagcgtggactccaacctactctcactaaccccggagaatgtcgaccaaacttcacttgtgcctgtagaaaggaagagtgcaagcgtgtgagcccgccttcttgtcctccacatcggcttcctactcttcggaaaactcagtgttgtgatgaatacgagtgtgcctgtaactgtgtcaactccaccgtctcgtgtccactgggatacctcgcatcgaccgcgaccaacgattgcggctgtaccactactacctgcctgcctgacaaggtgtgtgtgcatcgtagcaccatttacccggtgggccaattctgggaggaagggtgtgatgtgtgtacttgtactgatatggaagatgccgttatgggacttcgggtggctcagtgcagccagaaaccctgtgaagattcgtgtagatcgggatttacctacgtcctccatgaaggggaatgttgtggacgctgccttccctccgcctgcgaagtggtgaccggctcacctcgtggtgatagccagtcctcctggaagtccgtcgggtcccagtgggcgtcacctgaaaatccatgcctgattaatgagtgtgtgcgggtgaaagaggaagtgttcatccagcaaaggaacgtgtcgtgtccccaacttgaagtgcctgtgtgcccctcgggtttccaactgtcgtgtaaaacgtcggcatgttgtccttcgtgtcgttgcgagaggatggaagcctgcatgcttaacggaactgtcatcggtcccgggaaaaccgtgatgatagacgtgtgcactacctgccggtgtatggtccaggtgggagtgatctcgggattcaaacttgaatgtaggaaaactacttgtaacccgtgtccccttggctacaaggaagaaaacaataccggagaatgctgcggaaggtgtctgccaaccgcatgtaccatccagcttaggggcgggcaaatcatgacccttaaaagggacgaaaccttgcaggacgggtgcgacactcacttctgtaaggtcaacgaaagaggtgagtacttctgggagaaaagagtcactggatgcccaccatttgatgaacacaaatgcctcgcagagggtgggaagatcatgaagataccaggcacctgttgtgatacttgcgaggaaccggaatgcaacgatattactgcgaggctccaatacgtgaaggtcggctcctgtaagtcagaagtcgaagtcgatatccattactgccaaggaaagtgtgcatccaaggcaatgtactcgattgacataaacgatgtgcaggatcagtgttcgtgctgctcgcctactcgcaccgaaccgatgcaagtggcccttcactgtaccaatggctccgtcgtctaccatgaagtccttaacgcgatggaatgcaagtgctccccaaggaaatgttcgaag

SEQ ID NO: 21289 - DNA, 8439 bp, synthetic construct
  misc_feature 1..8439: note = source = /note="Description of Artificial Sequence: Synthetic coding sequence"
  source 1..8439: mol_type = other DNA
atgattccagcacgttttgccggtgtgcttttggcgctcgccctgatattgcccgggactctgtgtgccgaaggtacgaggggccgcagctcaaccgctagatgctcgctgtttggatcggactttgtgaatacctttgacggatctatgtactcgttcgcgggatactgctcctacctcctcgctggcggatgtcaaaagagatccttttccattatcggagattttcaaaatggtaagagggtgtccctctcggtctacctcggagagtttttcgatattcatctgttcgtgaacggtactgtgactcagggcgatcaaagggtgtcaatgccttacgccagcaagggcttgtaccttgaaaccgaagccggctactacaagctgagcggcgaagcatacggattcgtggcgagaatcgatggttcgggaaatttccaagtcctgctgtcagatcggtactttaacaagacgtgcgggttgtgtggtaatttcaacatttttgccgaggacgactttatgactcaagaaggaactcttacttcagatccctacgacttcgccaattcgtgggcactgagctccggtgagcagtggtgcgagcgagcgtccccaccatcgtcctcatgcaacatcagcagcggagaaatgcagaagggactgtgggaacagtgtcaacttcttaagtccacttctgtgttcgcgcgttgtcatccgctggtcgatccggaaccctttgttgcactttgtgaaaaaactctttgtgaatgtgcaggcggtcttgagtgtgcatgtccagcactcctggaatatgccagaacctgcgcacaagaaggaatggtgctgtacggatggaccgatcactccgcatgcagcccggtctgtcccgcgggcatggaatacaggcagtgcgtgagcccttgtgcccggacctgtcaatcactccacattaacgagatgtgtcaggaaagatgcgtggacggctgtagctgtcccgaaggacaacttctggacgaaggattgtgtgtggaatccactgagtgtccttgcgtgcattcaggtaagagataccctcctggcacctcgctctcgcgcgactgtaacacctgtatttgtaggaactcccagtggatttgttcgaacgaggaatgtccaggcgaatgtctcgttactggacaatcgcatttcaagtcatttgacaatagatacttcaccttctccggaatttgccagtacctgcttgcacgggattgtcaagatcattcgttctcaattgtgattgagactgttcagtgcgccgacgatagggacgcagtttgtacgagatcagtcactgtgcggttgccaggcctgcataacagccttgtgaaacttaaacacggtgccggtgtggctatggatggacaagatgtgcaactgcctctgctgaagggagacttgcgcatccaacacactgtgaccgcaagcgtgaggctttcatacggagaagatcttcaaatggattgggacggcagaggacgcctgcttgtgaagctctcgccagtgtacgcaggcaagacgtgtggactgtgcggaaattacaacgggaaccaaggggacgattttcttactcccagcggacttgccgaaccacgggtggaggattttggtaatgcttggaagctgcatggagactgccaagaccttcagaagcagcattcggatccgtgtgcgcttaatcctcgcatgaccagattttcggaggaagcatgtgcagtgctcaccagccctacctttgaggcatgtcatagagcagtctcgcccctgccttacctgcgtaactgtcggtacgacgtctgttcatgctcggacggacgggagtgcctttgcggtgcacttgcatcgtacgcagcggcatgcgctggtagaggagtgcgggtcgcatggagagagcctggacgatgcgaactcaactgtccgaaaggccaagtgtacttgcagtgcggaaccccctgcaatctgacgtgcaggtccctttcgtatcccgacgaagagtgtaacgaggcttgtctggagggttgcttttgcccgcccggcctgtacatggatgagagaggggactgtgtccctaaggcacagtgtccatgctactacgacggtgagatcttccagccagaagatatcttttctgaccatcacacgatgtgttactgcgaggatggttttatgcactgtaccatgtcaggcgtgcccgggtcgctgctccctgatgccgttctttcatcccctctttcccataggtccaagcggtcactctcctgtcggcctccaatggtgaagttggtgtgtcccgccgataacttgcgcgcagaagggctggagtgcaccaaaacctgccaaaactacgatctcgaatgtatgtcaatgggctgtgtctcagggtgcttgtgtcctcctggtatggttcgtcatgagaatcgctgcgtcgccctggaacgatgcccatgtttccatcagggtaaggaatacgctcccggtgagactgtgaagattggttgtaacacttgcgtgtgtcaggatagaaagtggaattgcactgatcatgtgtgtgacgcaacttgttccactatcggaatggcacattacctgacttttgacggccttaagtacctgttccccggagaatgtcaatacgtcttggtccaagattactgtggatcgaaccctgggaccttccgcatactcgtcggtaacaaggggtgttcccatccctcagtcaaatgtaagaagcgcgttactattcttgtcgaagggggtgagattgagctttttgacggagaggtgaacgtgaaacgccctatgaaggacgagactcacttcgaggtggtcgaaagcggccgatacatcattctgctgctcgggaaggcactgtccgttgtctgggaccggcacctgagcatttcggtggtgctcaaacaaacctatcaggagaaagtgtgcggcctctgcggaaactttgatggtattcagaataacgatcttacctcatccaatcttcaagtggaagaggatccagtggactttggaaactcttggaaggtgtcctcccaatgcgcggacactcggaaggtgccccttgatagcagcccagcaacctgccacaataacattatgaagcagactatggtcgacagcagctgccgaatcctgacctccgacgtgtttcaggattgcaacaagctcgtggatcctgagccttaccttgatgtgtgcatttatgacacttgttcgtgcgaatccataggagattgcgcctgcttttgtgataccattgcagcctacgcacatgtgtgtgcccagcatggtaaggtggtgacctggcgaacggcaacgctgtgcccgcaatcgtgtgaagagagaaatctccgcgagaatggttacgaatgtgagtggcggtacaacagctgtgcacccgcttgtcaagtgacttgtcaacacccagagcctcttgcctgtcctgttcagtgtgtcgagggttgtcatgcccattgcccacccggtaaaatccttgatgaacttttgcaaacctgtgtggatccagaggactgccccgtctgtgaggtggcaggaagaagattcgcctctgggaagaaggtcacgcttaacccttccgatccagaacactgtcagatctgccattgtgatgtggtcaaccttacgtgcgaagcatgccaagaaccaggcgggttggtggtccctccaactgacgccccggtgtcccccaccaccctgtacgtcgaggacatttcggaaccaccgctccatgacttttactgctcgcgcctgctggatctggtgttcctgctcgatggatcctccagacttagcgaagcggaattcgaagtgctcaaggcatttgtcgtggatatgatggagcgccttcgaatatcgcaaaagtgggtgagagtcgctgtggttgaataccatgatggatctcatgcatacataggacttaaagatagaaagcgcccttcggagctgaggcggatagcatcccaagtgaagtacgcaggatcgcaggtggcatcgacctcggaggtgctgaagtacacgctttttcagattttcagcaaaattgatagaccggaagcctccagaattactctcctcttgatggcatcccaggaaccccaacgcatgagccggaattttgtgcgctacgtccaaggactcaagaaaaagaaggtgatagtgatcccagtgggaatcggccctcacgcaaaccttaaacaaatccggctgattgagaaacaggctccagaaaacaaagcattcgtgctgtcgtcagtcgacgaactggagcagcagcgagatgaaattgtttcgtacctgtgcgatctggccccagaagccccgcctccaacccttccaccagatatggcccaggtgactgtgggtcctggtttgttgggggtgtctacgctgggtcctaagcgtaactcaatggtgctggatgtcgcgtttgtcttggagggtagcgataagatcggtgaagctgacttcaatagatccaaggaattcatggaagaagtgatacaaagaatggatgtcggccaggatagcattcatgtgactgttcttcagtactcctatatggtcactgtggaatacccattttccgaagcacaatcgaagggagacattctccagcgtgtgcgcgaaatccgctaccagggtggtaatcggaccaataccggacttgctcttaggtacctttcggatcactcctttctcgtgtcacaaggcgacagagaacaggccccaaatctggtgtacatggtgacgggaaaccccgcgagcgatgaaatcaagcgcctcccgggagatattcaagtggtgcccatcggggtcggacctaacgctaacgtgcaggagctcgaaaggattggctggccgaatgcgccaatccttatccaagattttgaaactctgcctagagaagcgcctgatctcgtgcttcagcggtgttgttccggcgaaggtctgcaaatacctaccctttcacccgcccctgactgtagccaacccctggatgtgatactgttgctcgatgggtcctctagctttccggcatcatactttgatgagatgaaatcgtttgccaaggccttcatctccaaggcaaacatcggcccacgccttacccaagtcagcgtgcttcaatacggctcaataaccaccatcgacgtgccttggaatgtggtgccagaaaaggcacacctgctgtcattggtggatgtgatgcagcgagagggcggacctagccaaattggcgatgcactgggttttgcagtccggtaccttaccagcgagatgcatggcgcgcgcccaggggcatcaaaagcagtcgtgattcttgtcaccgatgtgtcggtggattccgtcgatgccgcagcagatgcggcacgttcgaaccgggtcactgtgtttcctattggtatcggggaccgttacgacgcggcacagctgagaatcctcgcgggacctgctggcgatagcaatgtcgtcaagctccaacgtatcgaggaccttcccactatggtgacgctgggaaactcatttcttcataaactgtgttcaggatttgtgcgaatttgcatggatgaagatggcaacgaaaaacggccgggggatgtgtggacccttcctgatcaatgccataccgtcacttgccagcctgatggtcagactctgttgaagtcgcaccgcgtgaactgtgatagagggttgcgtccttcatgcccaaactcccaatctcctgttaaggtcgaagaaacctgtggctgtagatggacttgtccgtgtgtgtgcactggatcatcgactcggcatatcgtgacttttgatggtcaaaactttaagttgaccggttcctgcagctacgttcttttccaaaacaaagaacaagatcttgaagtcattctgcataatggggcatgtagcccaggcgcgagacaagggtgtatgaaatcaattgaggtgaagcattccgccctgtctgtggaacttcatagcgatatggaagtgactgtgaacggacggcttgtctcggtgccatacgtgggtggaaacatggaagtcaacgtgtacggggcaattatgcatgaggtgagattcaatcatctggggcacattttcacttttaccccacagaacaacgaatttcagctgcaactcagccccaagacctttgcctcgaaaacctacggattgtgtgggatctgtgacgagaacggggcgaacgatttcatgctccgagatgggactgtcaccactgattggaaaaccctggtgcaggaatggactgtgcaaagaccaggacaaacttgccagccgatcttggaagagcaatgcctcgtgccggattcatcccactgtcaagttctcctgttgcctttgtttgcagaatgtcacaaagtgcttgcacctgcaactttctacgctatatgtcagcaggatagctgccaccaagagcaagtctgtgaagtcattgcttcgtacgcccacctctgcagaactaatggagtttgtgtcgactggcgaacccccgacttttgcgcaatgtcgtgtccaccatcgttggtctacaatcactgtgaacatggttgtcctcgtcactgcgatggaaacgtgagctcatgtggggaccatccatcggagggctgtttctgccccccggacaaagtcatgcttgaagggtcatgtgttcccgaggaagcatgcactcagtgcattggggaagatggagtccagcatcagtttcttgaagcatgggtgcctgatcaccagccatgtcagatttgcacctgcctgtccggtcgtaaagtcaactgcactacgcagccttgccctactgcgaaggcccctacttgtggactgtgtgaagtggcaagactgaggcagaacgcagaccagtgttgtccagaatatgaatgtgtctgtgatccagtgtcatgtgatctgcctcccgtgcctcattgcgaaagagggctgcagccaaccctgaccaatcccggtgaatgccggcctaatttcacctgtgcatgccgcaaggaggagtgtaagcgtgtgagccctccttcctgcccaccacatagacttccaaccctgcgtaagacgcaatgttgcgacgagtacgaatgcgcctgtaattgcgtcaactccaccgtgtcctgtcctctgggatacctggcatccaccgcaacgaatgactgtggatgtaccacgaccacgtgtctgccagacaaggtgtgcgtccaccgatcaaccatttatcctgtcggacaattttgggaggaaggttgtgacgtctgcacctgtaccgatatggaagatgcagtgatggggctccgggtcgcacaatgctcgcagaagccgtgtgaggactcttgcagatccggtttcacctacgtgctgcacgagggagaatgctgtggtcggtgtttgccctcggcttgtgaggtggtgactggatctcctcgtggcgactcacaatcctcgtggaagtccgtcggtagccaatgggcaagccccgagaacccctgtcttatcaacgaatgtgtcagagtgaaagaagaagtgtttatccagcagcggaacgtctcctgccctcagcttgaggtgcctgtgtgcccttcgggattccaacttagctgcaagaccagcgcgtgttgtccttcgtgtaggtgtgaacgtatggaggcatgtatgctcaacggaactgtcattggaccaggaaaaacggttatgatagacgtgtgtaccacctgtcgctgtatggttcaagtgggcgtcatttcgggctttaaactggaatgtagaaagactacctgtaatccctgtccgcttggttacaaggaagagaacaacactggcgaatgttgtggacgctgccttcctactgcatgtacgatacaactgagaggaggtcaaatcatgactttgaaaagagacgaaaccttgcaagacggttgtgacactcacttttgtaaggtgaacgagaggggggaatacttttgggaaaagcgggtgaccggatgtccaccttttgatgaacataagtgtttggcagaaggaggcaagattatgaagatcccaggcacctgttgcgacacttgtgaagaacctgaatgcaatgatatcaccgctcggttgcaatatgtgaaggtggggtcttgtaagtccgaagtggaagtggatattcactattgtcaaggaaagtgtgcatcaaaggccatgtactcgatcgatatcaacgacgtgcaggatcagtgttcgtgttgttcaccaacccgcaccgaacccatgcaggtggcattgcattgcaccaatgggtcggtggtgtaccatgaggtgctgaacgcgatggagtgcaaatgctcgcctcgcaaatgttcaaag

SEQ ID NO: 21290 - DNA, 8439 bp, synthetic construct
  misc_feature 1..8439: note = source = /note="Description of Artificial Sequence: Synthetic coding sequence"
  source 1..8439: mol_type = other DNA
atgatcccagcaagattcgccggggtccttttggccctcgccctgatccttccaggaactctgtgcgccgaaggtactagaggacgctcctcaactgcaagatgcagcctgttcggcagcgacttcgtcaacactttcgacggaagtatgtactcattcgccggatactgctcctacctcctggcaggaggctgccagaaaaggtccttctccatcatcggcgactttcagaatggaaagcgcgtgtccctgtcggtctacctcggagagttctttgatatccacctctttgtgaacggaaccgtgacccagggtgatcagagagtctcgatgccttacgcaagtaaagggctctacctggagactgaagccgggtactacaagctgtcgggagaagcctacggtttcgttgcgaggatagacggctccggcaatttccaggttctgttgtcggaccgctacttcaataagacctgcggcttgtgcggaaacttcaacattttcgcggaagatgactttatgactcaggagggcacgctgacctcagacccttacgacttcgctaattcatgggcactctcgtcgggagagcagtggtgtgaaagggccagccctccctcgagctcgtgcaacatctcgtcaggcgagatgcagaaaggcctctgggaacaatgccagctcctgaagtccacttcagttttcgcgaggtgccatccactggtcgacccggagccattcgtcgcactctgtgaaaagactctctgcgaatgtgctgggggtttggaatgcgcgtgcccggcattgctggagtacgccaggacttgtgcgcaggaaggcatggtcctgtacggatggaccgaccactcggcctgcagcccggtgtgcccggccggaatggaataccgccagtgtgtgtcgccgtgtgcacggacttgccagtcactccacatcaatgagatgtgccaagaacgctgcgttgatggatgctcatgcccggaagggcaactcctcgacgaagggctctgcgtggagtcgaccgaatgtccatgcgtgcattcgggcaagcgctacccgccaggcactagcctgtcacgggactgcaacacttgcatctgccggaactcgcagtggatctgctccaatgaggaatgcccgggcgaatgtttggtgacgggtcaaagccacttcaaatcgttcgacaacagatacttcaccttctctggaatatgccagtacttgctggcgcgtgattgtcaggaccactcattttcaatcgtgatcgagactgtgcagtgtgcggacgatcgcgatgccgtctgcactaggagcgtcaccgtcaggctgccaggactgcacaattcgctggtcaaactcaagcacggagcaggagtggctatggatggtcaagatgtgcagctgcctctgctgaagggtgacctgcggatccaacacaccgtgaccgcgtcggtgcgcctgtcatatggagaggacctgcagatggactgggacggacgcggtagactgttggtcaagctgagcccggtttacgcaggcaagacttgcggtctttgtggaaactataacggaaaccagggcgatgactttctgaccccatccggactggccgaaccgagagtggaggactttggaaacgcctggaaactgcatggagactgtcaagatttgcaaaagcaacacagtgacccgtgtgccttgaacccgcgcatgactaggttctcagaagaggcgtgcgcggtgctcacgtccccaacgttcgaggcctgccatagagccgtgagccctctgccttacctgcgaaactgccggtacgatgtctgttcctgttccgatggaagagaatgcctgtgcggagcgcttgcatcgtacgcggccgcctgcgccggtcggggggtgcgagttgcctggcgcgaaccaggcagatgcgagctgaactgcccgaaggggcaagtgtacctgcagtgtggaaccccgtgcaacctgacttgtcggtccctgagctacccggatgaggagtgcaacgaagcctgcctcgaaggatgcttctgcccgccgggactgtacatggatgaaaggggagattgcgtgccgaaggcacaatgcccgtgctactacgacggtgagattttccagccagaggacatcttctccgaccaccacaccatgtgctactgtgaggatggtttcatgcattgcactatgagcggggtccctggaagccttctgccagacgccgtgctctcgagccccctctcgcatagatcaaaaaggtccctcagttgccggccgcctatggtcaaactggtctgtccggctgataatctccgggccgaaggacttgaatgtactaagacctgccagaactatgatctggaatgtatgtccatgggttgcgtgagtggctgtctgtgtccgccgggaatggtgcggcacgagaaccggtgcgtggcgctcgaacggtgcccatgctttcatcagggaaaggagtacgccccgggtgaaactgtcaaaatcggatgcaacacctgcgtgtgccaggaccgcaaatggaactgcacggaccacgtctgcgacgctacctgttcgaccattgggatggctcactacctcacgttcgatggcctcaagtacctgttcccgggggaatgccaatatgtcctggtgcaagactactgtggctctaatccaggcacttttagaatcctggtgggaaacaaaggatgttcccatccaagcgtcaagtgcaagaaaagagtcacgatcctggtggaaggaggcgaaatagaactgtttgacggagaggtgaacgtcaagcggcctatgaaagacgaaactcacttcgaggtggtcgagtccggccggtatatcatcctgctcctcggaaaggccctgtctgtggtctgggaccggcatctgtctatcagtgtcgtcctcaagcaaacttaccaagaaaaagtctgtggcctttgcggcaacttcgatgggatccagaacaatgacttgaccagttccaacctccaggtcgaggaagatccggtggatttcggtaactcgtggaaggtgtcctctcagtgtgctgatacccgaaaggtgcctctcgatagcagcccggcgacctgccacaataacattatgaagcagaccatggtggactcgtcgtgtagaatccttacctccgacgtgttccaggactgcaataagctggtggatccggaaccataccttgacgtgtgtatctacgatacctgctcttgcgaatcgatcggtgactgcgcttgcttctgcgacactattgccgcttacgctcacgtttgtgcacagcacggaaaagtggtgacctggcggactgccactctctgcccccaaagttgtgaggaacgcaacctgcgcgagaatggatacgaatgcgaatggcggtacaacagctgcgccccagcgtgtcaggtgacttgccaacatcccgaaccgctggcatgcccggtccagtgcgtggagggatgccatgctcactgtcctccgggaaagatcctggatgaactcctgcagacttgcgtcgatccagaggactgtccggtctgcgaagttgcgggacggagattcgcctcgggaaagaaagtgaccctcaatccatcggacccggagcactgccaaatttgccactgcgacgtggtgaaccttacctgtgaggcttgccaagagccaggcggacttgtggtgcctccgaccgacgccccagtcagtcccaccaccctttacgtggaggacatcagcgaaccgcccctgcatgacttctactgctcccggctgctcgacctggtgtttctcctggacggatccagtcggctgtccgaggcggaattcgaagtgctcaaggcctttgtggtggacatgatggaacgcctgaggatcagccaaaagtgggtgcgcgtggccgtcgtcgagtaccacgacggatcccacgcatacatcggtctgaaggacagaaagaggccgtcagaacttagacggatcgcttcacaggtgaagtatgccgggtcgcaggtggccagcacctcagaggtgctgaagtacactctttttcagattttcagcaagatcgaccggcccgaggcatcacgaattactctgctccttatggcctcgcaggaacctcagcgcatgtcccgcaatttcgtgaggtacgtccaagggctgaaaaagaagaaggtcatcgtgatcccagtcggaatcggcccccacgccaacctcaaacaaatccggttgattgagaagcaggcgccggaaaacaaggcatttgtgctttcctcagtggacgaattggaacagcaacgggacgaaattgtgtcctatctctgcgatctggccccagaagcgcctccaccaactctgcccccagacatggcccaagttaccgtgggaccgggcctcctgggcgtgtccactctgggacccaagaggaattcaatggtgctggacgtggcattcgtcctggaaggttcggataagatcggcgaagcggatttcaacaggagcaaggagttcatggaagaggtgatccagagaatggacgtgggacaagatagcatccatgtgaccgtgcttcagtactcctacatggtgacggtggaatacccattttctgaagcacagagcaagggtgacatcttgcagcgggtccgggagatccgctaccaggggggaaaccgcactaacaccggcctcgccctcagatacctgtcggaccatagcttcctggtgtcgcagggggaccgggagcaggctcccaacctcgtctatatggttactgggaatccagcctccgatgagatcaagcggctgcctggagatattcaagtggtgccgatcggggtcggacctaacgcaaatgtacaagagctcgagcgaatcggttggccgaacgctccgatcctcatccaggacttcgagactctccctcgggaggccccggacctcgtgctgcagcggtgttgttccggagaaggactgcagataccaaccctgtcgccggcgccggattgcagccaacctctggacgtgatcctgctgctcgacgggtcctcatcctttccagcctcctattttgacgagatgaagtcgtttgcaaaggcattcatctcgaaagctaacattggaccccgcctcactcaagtgagcgtgctccagtacggctctatcactaccatcgatgtcccatggaatgttgtgccggaaaaagcgcacctgctgtcgcttgtggacgtgatgcagcgcgagggaggcccgtcccaaatcggagacgcactgggatttgctgtccggtacctgacgtccgaaatgcacggagcaagaccgggagcttccaaggcggtcgtgattttggtgactgacgtgagcgtcgactcggtggatgccgcggcagatgctgcacgctcgaatcgggtgactgtgtttcccattggtatcggtgatcgctacgatgccgctcagctccggatcctcgccggaccggccggggattccaacgtcgtgaagctgcaacggattgaggacctcccaaccatggtgaccctgggcaattcattcttgcataagctgtgcagcgggttcgtgcgcatctgcatggatgaagatggaaatgaaaaaagacctggcgatgtgtggaccctgccagatcagtgccacaccgtgacttgtcagccggatggacaaactttgctgaagtcacaccgcgtgaattgtgaccgaggactgcgcccgagctgcccgaactcccagtcccctgtgaaggtcgaagaaacctgcggatgccgctggacctgtccgtgcgtgtgtactggatcaagcactagacatatcgtcacttttgacggccagaacttcaagttgacgggctcgtgcagctacgtgctctttcagaacaaggagcaagatctggaagttatcctccataacggtgcctgctcgccgggagcgcgccagggatgtatgaagagcattgaggtcaagcatagcgcgctgtcagtggaactccactccgacatggaagtgaccgtcaatgggcgcttggtgagcgtgccatacgtcggaggaaatatggaggtgaacgtgtacggcgcgatcatgcacgaagtgaggttcaaccacctcgggcacatattcactttcactccacagaacaacgagttccaattgcaactctcgccaaaaactttcgcgtcgaaaacgtacggcctgtgcggaatctgcgacgaaaatggagccaatgacttcatgctccgggatgggacggtgactaccgattggaaaaccctggtgcaggagtggactgtgcaaaggccgggccagacctgccagcccatcctggaggaacagtgtttggtgcctgactcgagccactgccaagtgcttttgcttccgttgttcgctgagtgtcataaggtcctggcgccagctacgttctacgcgatctgccaacaggattcctgccaccaagagcaggtctgcgaggtgatcgcttcctacgcgcatctctgtcgcaccaatggggtgtgtgtggattggcggaccccagacttctgcgctatgtcatgtccgccgtcgttggtctacaatcactgcgaacacggatgcccccgccattgcgatgggaatgtgagctcgtgcggagatcacccgtcagaaggatgtttttgtccgccggacaaggttatgctggaggggtcgtgtgtcccggaggaggcttgcacccagtgcatcggagaggacggagttcagcatcaattcctggaggcttgggtgccggatcaccagccgtgccaaatctgtacctgtttgtcgggacgtaaggtcaattgcacgacccaaccctgcccgacggcaaaagcaccgacctgtggtttgtgcgaggttgccagacttcggcagaacgcggatcagtgttgccctgagtacgaatgcgtgtgcgacccagtttcctgcgacctgccgccagtgccgcattgcgaacgcggtctgcagccaaccctgaccaaccccggagaatgcagaccgaacttcacctgcgcgtgcagaaaggaagagtgcaaacgcgtgagccccccgtcctgcccaccgcatcggctgccgacgttgaggaaaacccagtgctgcgacgaatacgaatgcgcctgtaattgcgtaaactcgactgtgtcgtgccccctgggctaccttgcatccaccgcaaccaatgattgtggatgcaccactactacgtgcctgccggataaagtttgtgttcaccggtccactatctaccccgtaggccagttctgggaagagggatgcgacgtgtgcacctgcacggacatggaggacgccgtgatgggacttagagtggcacaatgcagccaaaagccttgcgaggactcatgccgcagcgggttcacttacgtgctccatgaaggagaatgctgcggacgatgcctgccctcagcctgcgaagtggtgactggatcgccgcgtggcgactcccaaagctcctggaaatccgtcgggtcccaatgggcctcgccagagaacccctgtttgatcaacgagtgcgtccgcgtgaaggaagaagtgttcatccaacaacgaaacgtatcctgtccgcagcttgaggtgcctgtttgcccttcaggctttcaactgagctgcaagacgtcagcatgctgcccttcatgccgttgcgaacggatggaggcgtgcatgcttaatggcaccgttatcggccctggaaagaccgtcatgatcgacgtctgcaccacctgccgctgcatggtgcaggtgggggtgatctcagggttcaagctggaatgccggaaaactacctgcaacccttgtccgctcgggtacaaggaagagaacaataccggcgaatgctgtgggcgctgcctgcctactgcttgcaccatccagctgcgcggcggacagatcatgaccctgaagcgcgacgaaactcttcaggatggctgcgatacccatttttgcaaggtgaatgaacgaggcgagtacttctgggaaaagagagtgactggctgcccgcctttcgacgaacataaatgcctggcggagggaggaaagatcatgaagatccccggtacctgctgcgatacttgcgaggaacctgaatgtaatgacattactgcccgcttgcagtacgtcaaggtcgggtcttgcaagtcagaggtggaagtagacatccactactgccagggcaaatgcgcctcaaaggcgatgtacagcatcgacattaacgatgttcaggatcagtgctcatgctgttcgccgactcggacggagcctatgcaggtcgccctgcactgtaccaacggatcggtagtgtaccacgaggtcctgaacgccatggaatgtaaatgctccccgagaaagtgctccaaa

SEQ ID NO: 21291 - DNA, 8439 bp, synthetic construct
  misc_feature 1..8439: note = source = /note="Description of Artificial Sequence: Synthetic coding sequence"
  source 1..8439: mol_type = other DNA
atgattcctgcccgcttcgcaggagtgttgttagcccttgctttgatacttccgggaactttatgtgctgagggtacccgcggtcgaagctctacggcacgttgctctctcttcggttcggatttcgttaatacattcgacggtagtatgtacagctttgccggttactgctcttatctgctggctgggggttgccaaaagagatcattctctattattggggatttccaaaacggaaagagggttagtctgagtgtgtatctcggtgaattttttgatattcatttgttcgttaatggcactgttacacagggagatcaaagagtgagtatgccttatgccagcaagggattgtaccttgagacagaagccggttactataagctctctggggaggcttacggttttgtcgcgagaattgatggatctggcaacttccaagtgttgttgtccgacagatacttcaacaagacttgcggactatgcgggaactttaatatctttgcagaggatgattttatgactcaagagggaactttgacaagcgatccttacgatttcgctaattcgtgggctttgtcctcaggagaacagtggtgcgaaagggcatcgcctccatcatccagctgcaatatttcaagtggagagatgcaaaaggggctgtgggagcaatgccaattactgaagtcgacatccgtgttcgctagatgtcatcctttagttgaccctgagcctttcgttgccctttgcgagaagactctttgtgaatgcgctggaggattggagtgtgcttgccctgctttgctcgaatatgctaggacatgcgctcaagagggcatggtgctatatgggtggactgatcactcggcatgctctcctgtgtgccctgcaggtatggaatatagacagtgtgtgtcaccctgcgcgaggacctgtcaaagcctccatattaacgagatgtgccaggaaagatgcgttgatggttgctcttgtcctgaaggccagttactggacgagggcctctgtgttgaatccactgaatgcccttgtgttcactcaggtaaacgttatccgccgggtactagcttgtctcgggattgcaatacttgcatctgtaggaattctcaatggatctgctctaacgaagagtgccctggagagtgtctggtcactgggcaatctcatttcaagtcttttgataaccgctactttaccttttctgggatttgtcaataccttttagctagagattgtcaagaccactccttcagtatagttattgagaccgttcagtgcgccgacgatagagatgctgtctgcacccgcagcgttactgttcggctgccaggtcttcacaattctttggtgaaattgaagcatggcgctggtgttgctatggatggtcaggacgtccagctgccattgctgaagggggatttgaggatacaacatactgtaacagcaagtgtgcgtcttagctacggcgaggatttgcagatggattgggacggtaggggacgtctgctagttaagttgtctcctgtatatgctggtaagacatgcgggctttgcggaaattataatggtaaccagggagatgatttcctcactccatcaggactcgcagagccacgtgtggaggactttggtaacgcttggaagcttcatggggattgccaggaccttcaaaagcagcattccgatccttgtgcacttaaccctagaatgactcgattcagtgaggaggcatgtgcagtgttaactagccctactttcgaagcatgccacagagctgttagcccacttccatatctccgaaactgcagatatgatgtttgttcctgttcggacggccgcgagtgtctctgtggcgctcttgctagttacgcggcggcttgtgcaggtaggggcgtgagggttgcctggagggaaccaggtcggtgcgaattaaattgtcctaaagggcaagtttatcttcaatgtggcacgccctgtaatcttacctgtcgtagtttgtcctatcccgacgaggaatgtaatgaggcttgcctcgagggatgcttctgtcctcccgggctttacatggacgaaaggggagactgtgtgcctaaggctcagtgcccgtgttactatgacggtgagatttttcaaccagaagacatattttctgatcatcatacaatgtgctactgtgaagatggtttcatgcactgtactatgagtggagttccgggatctttgttgcccgatgcagtgttaagttcccccctttctcaccgatcgaaaaggtctttgtcctgtagaccccctatggtgaaacttgtatgccctgctgataaccttcgagctgaggggttggaatgcacaaagacatgccagaactatgaccttgagtgcatgtccatgggctgtgtgtcaggatgtttgtgcccgccaggtatggttaggcacgaaaatcgttgcgttgcattggaaaggtgtccatgtttccatcagggtaaagaatatgcacctggtgagactgtcaagataggatgcaatacttgtgtatgccaggacagaaagtggaactgcactgatcatgtctgtgatgcaacttgttcaacaataggtatggctcactaccttactttcgatggtcttaagtatctatttccaggggagtgtcaatacgtgctcgtgcaggattattgcgggtcgaatccaggcacatttaggatccttgtgggtaataaaggatgttcccacccatctgtgaagtgtaaaaaaagagtcacaatacttgtggaggggggtgaaatagaattatttgacggtgaggtcaacgttaaaagacctatgaaggatgaaacacatttcgaggttgttgaatcaggtagatatatcattcttttattgggcaaggcactatcagtcgtttgggatcgccatttgtcgatcagtgtcgtgcttaagcagacataccaagagaaggtttgcgggttgtgtggaaacttcgatggtatacaaaataatgaccttacgtcaagtaaccttcaggtagaagaagatcccgttgattttggaaattcgtggaaggtttcatcacaatgtgctgacactagaaaggttccccttgattcatctccggccacttgccataacaatatcatgaaacaaaccatggtggattcctcctgtagaattcttacatctgacgtcttccaggactgtaataaacttgtcgacccagaaccatatcttgatgtttgtatctacgacacatgttcctgtgaaagcatcggagattgtgcgtgcttttgtgatactattgccgcatatgcacatgtctgtgcgcagcatggaaaggttgtaacatggagaactgccacactctgcccacaatcttgtgaagaacgtaatctaagagagaacggttatgaatgcgaatggagatataattcgtgcgctcctgcttgtcaggtgacttgtcaacatccggagcctttggcttgtcctgtgcagtgcgttgaggggtgtcatgcacattgccctcctggtaagattttggatgaacttcttcaaacctgcgttgacccagaagactgccctgtgtgtgaagtggctggtaggcgctttgctagcgggaagaaagtcactttaaacccttccgaccccgagcattgccagatatgtcactgcgatgtggtaaatctcacatgtgaagcatgtcaagaaccaggaggtctcgttgtgcctccgacggatgcgcctgtgtctccgactactctctatgttgaagatatttccgaacctcctttgcatgacttctattgttccaggttgttagatctagtcttcttattggatggaagtagcagactatcggaggccgaatttgaagtgctcaaggcttttgtggttgatatgatggagcgtttgagaatttctcaaaaatgggttcgtgtggctgttgtggagtaccatgatgggtcacacgcctacatcggtcttaaagatcgtaaacggccttcagagttgcgtcgaatagcatcacaagttaagtatgctggaagccaggttgcctcgacttcggaggtcttaaagtacaccttatttcagatattctccaagatcgatcggccagaggcttcgcgtataacacttcttttgatggccagccaagaaccgcagcgaatgagtaggaactttgtccgttacgtgcaaggattgaaaaagaaaaaggtgattgtgatacccgtcgggattgggccacacgctaaccttaaacaaatccgtcttatcgaaaaacaagctccagaaaacaaagcattcgtgctctccagtgttgacgaacttgagcagcaaagagatgagattgtttcgtatctttgtgatcttgctcctgaagcacctccgccaactctacctccagatatggcgcaagtgacagtcggacctgggcttctgggcgtttccactctcgggccaaagaggaactcaatggttttggacgtggcttttgtgcttgaaggctctgataaaataggagaagccgactttaacagatctaaggaattcatggaggaagttatccaaaggatggatgtcggacaggacagcattcacgttaccgtcttgcaatactcatatatggtgacagtggaataccccttctctgaggcacagtctaagggtgatatccttcaaagagtgagagagattaggtaccagggcggtaacaggacaaatactggccttgctttgcgatatctgtccgaccatagcttcctggtatctcagggcgatcgggagcaagcccctaacttggtgtacatggttacgggcaatccagcatcagatgaaataaagagattgccaggagacatacaagtggtaccgatcggcgtgggtcccaacgccaatgttcaagaattggaacgaatcgggtggccgaatgccccaatccttatacaagattttgaaactcttccaagagaagcgcctgatctggttttgcaaagatgttgctcgggtgagggccttcaaatacctaccctgtccccggcacctgattgctcccagccactagacgtgatcctgttgctcgacggatcatcatcatttcctgcttcatatttcgatgagatgaagagcttcgcaaaggcattcatttctaaggcgaatataggtcctagacttacacaggtgagcgtgcttcagtacggctctatcactaccatagacgtaccttggaatgttgtacctgaaaaggcccacttactgtctcttgttgatgttatgcagcgcgaaggagggccatctcaaattggagacgctcttggttttgctgttagataccttactagcgaaatgcatggggctcgaccgggggccagtaaggctgtggtgattctcgttactgatgtgagcgtcgatagtgttgatgcggccgcagacgctgctcggtctaatagggtaacagtctttccaatcggaatcggggaccgatacgatgcagctcaacttcgaatcttggctggacccgccggcgattctaatgtagttaaactccaaagaatcgaagacttgcctactatggttaccctgggaaatagctttctccacaagctttgctctggtttcgttcgtatttgtatggatgaggacggtaatgagaaacgtccgggagacgtttggacgcttcctgatcaatgtcacactgtgacatgccagccagatggtcaaacccttcttaaatcgcatagagttaattgcgataggggattgaggccaagctgcccaaatagccagagtcctgtcaaagtcgaagaaacgtgtggctgtcgatggacatgtccatgtgtgtgcaccggatcgtccacccgtcacattgttacgttcgatggacaaaacttcaagcttactgggagctgctcgtatgttctcttccaaaataaggagcaagatttggaagttattcttcacaacggcgcttgtagcccgggagctcgtcagggatgcatgaaatctattgaggttaagcatagtgctctcagcgttgagcttcacagtgacatggaagttacagttaatggaaggttggtgagcgtgccttatgtcggagggaatatggaagttaatgtatatggtgctattatgcatgaagttagatttaaccacttgggtcatatttttactttcactcctcaaaacaatgaatttcagctccaacttagcccgaaaactttcgcaagtaagacgtatggattgtgtggtatttgtgatgagaatggagctaatgatttcatgcttcgggacggaaccgttacaactgattggaagactcttgttcaagaatggaccgtccagcgtcctgggcagacgtgccaacctatccttgaagaacaatgcttggttcctgactcctctcattgtcaggtccttttgcttcccttgttcgcagaatgccataaagtactcgccccagccactttctacgccatatgtcagcaggatagctgtcatcaggaacaggtctgtgaggttatcgctagctacgcccacctttgcaggactaacggtgtatgtgtagattggcgtactcctgacttttgcgctatgagctgcccaccgtcgttggtgtacaatcattgcgagcatgggtgcccccgacattgcgacggcaacgtttcttcatgtggcgatcatccttccgagggttgcttttgccctcccgataaagttatgttggaaggatcttgtgtacctgaggaagcttgcacacaatgtattggagaagatggtgtgcaacatcagttcttggaggcctgggttccggatcatcaaccgtgccaaatttgtacgtgcctgtccgggagaaaggtcaattgcactacgcaaccatgccctactgcaaaggcacctacttgcggtctctgtgaggtggcacggttgcgtcaaaatgcagaccagtgctgccctgaatatgaatgcgtctgtgatccagtgtcttgtgatctgccccccgtgccccattgcgagcgaggcttacaacctacccttactaacccaggcgaatgcaggcctaattttacctgcgcctgccgaaaggaggagtgcaagcgagtgtcccccccttcctgcccaccccataggttgcctacacttcgaaagacccagtgttgtgatgaatacgagtgcgcttgcaattgtgtgaattccacagtctcttgtccacttgggtatttagctagtacagcaacaaacgactgcggatgtacaaccactacttgtcttccagataaagtatgtgttcacaggtcaaccatctacccagtgggacaattttgggaggagggatgcgacgtatgcacttgtactgacatggaggatgctgttatgggcttgagggtcgctcaatgttcgcagaagccttgtgaagattcttgcagatccggattcacctacgttttacatgagggggagtgttgtggaagatgtcttcctagtgcatgtgaggtggtcaccgggagcccgagaggcgacagtcaaagctcgtggaagtccgtgggttcccaatgggcttcccccgaaaacccatgcctcattaacgaatgtgtgcgagtcaaagaagaggttttcattcaacaacgcaatgtttcatgtcctcaacttgaagtacccgtatgcccatcgggctttcagctgagctgtaagacaagtgcttgttgcccatcgtgtaggtgcgagagaatggaggcttgcatgttgaacggaactgtaataggacctggtaaaaccgttatgattgatgtctgtaccacatgcaggtgtatggtacaagtgggagttattagcggtttcaagcttgagtgtcgcaaaactacctgtaacccatgtcctctggggtacaaagaagaaaataatactggtgagtgttgcggtaggtgcctaccgactgcatgtactattcagttgcggggtggacagatcatgaccttgaagcgggatgagaccctccaggacggatgtgacactcatttttgcaaggtgaacgaacggggcgaatatttctgggagaagagggtgaccggctgccctcctttcgatgaacataagtgtcttgctgaggggggtaagataatgaagattccaggcacctgctgcgatacatgcgaagaacctgagtgcaacgacatcaccgcccgactgcagtatgttaaggtgggttcatgcaaatctgaagttgaggtggatatccactattgccaggggaagtgcgcatcaaaagctatgtactccattgatattaacgacgttcaagatcaatgttcttgctgctcccccacgaggacagagccaatgcaagtggcactccactgcacaaacggttctgttgtttaccatgaggtcctcaatgctatggaatgcaaatgttctccccgcaagtgtagtaaa

SEQ ID NO: 21292 - DNA, 8439 bp, synthetic construct
  misc_feature 1..8439: note = source = /note="Description of Artificial Sequence: Synthetic coding sequence"
  source 1..8439: mol_type = other DNA
atgattcccgccagattcgccggtgtgctcctcgcactggcactcattctgccgggaaccctgtgtgcggaaggaacgcgcggccgctccagcactgcaagatgtagcctgttcggatcagatttcgtcaataccttcgatgggtccatgtactccttcgccggttactgctcgtacctcctggcgggaggatgccagaaacgctctttttctatcatcggcgattttcagaacggaaagagagtgtctctgtcggtctatctcggcgagttctttgacatacatctgttcgtcaacggtaccgtgacccagggcgatcaacgggtgagcatgccgtacgccagcaaaggcttgtacctcgagacggaagccggctactacaagctgtccggcgaagcatacggattcgtggcccgcatcgacggaagtggtaacttccaggtcttgctgtccgaccggtacttcaacaaaacgtgtggactttgtggtaactttaacatcttcgcagaagatgatttcatgactcaagaaggaaccctgacctccgacccttacgactttgcaaactcttgggcgctgagctccggagagcaatggtgcgagagggcgtcaccgccatcttcatcctgcaatatctcgagtggcgagatgcagaagggcctctgggaacaatgccagctcctgaagtcaacctcagtgtttgctagatgtcacccactcgtggatcctgagcctttcgtggccctctgcgagaaaaccctgtgcgagtgcgccggcggacttgagtgtgcgtgccctgcgcttctggaatacgcaagaacctgcgctcaagaaggcatggttctgtacggatggactgaccactcggcgtgcagcccggtgtgtccagcgggtatggaataccgccaatgcgtcagcccgtgtgctcgcacttgccagtccttgcatatcaatgagatgtgccaagagagatgtgtggacggatgctcctgcccggaggggcaactcctggatgaagggctctgcgtggagtcaactgaatgcccgtgcgtccattcgggcaagcgttacccgccgggaacgagccttagccgtgattgtaacacctgcatctgccgcaattcgcagtggatctgctcgaatgaggagtgcccaggagaatgtctcgtgactggacagagccactttaagtcgttcgacaacagatactttaccttcagcgggatctgccagtacttgctggcgcgggattgtcaggaccactcgttttcgatcgtaatcgaaaccgttcaatgcgccgatgaccgagacgccgtctgtactagatccgtgaccgtgcggctcccgggtctgcacaattctctggtgaagctgaagcacggagccggcgtcgcaatggacggacaggatgtgcaacttccgctcctgaaaggagatctccgcatccagcacactgtgactgcctcagtccgcctgtcgtacggagaggacttgcagatggactgggatggtcggggcaggcttctggttaagctgtccccggtatacgccggcaagacctgcggcctgtgtggcaactacaatggaaaccaaggagacgatttcctgaccccctcaggcctcgccgagccacgcgtggaggacttcggaaatgcctggaaactccatggggactgccaggatctgcaaaaacaacacagcgatccgtgtgcgctgaacccgagaatgacccgcttctctgaggaggcatgcgccgtgctgacttcgccgacctttgaggcctgccaccgggccgtgtcgccactgccatacctgagaaactgtcgttacgacgtgtgttcgtgtagcgacggccgcgaatgcctgtgtggggctctcgcgtcatacgcggcggcctgcgcgggaagaggcgtgcgcgtggcatggcgagaaccaggaagatgcgagctgaactgcccaaagggacaggtctatctccaatgcggaaccccgtgcaaccttacctgccgtagcctcagctaccccgatgaagaatgcaacgaggcctgccttgaaggatgcttttgcccgccaggtctgtacatggacgagagaggagactgcgtgcctaaagcccagtgcccatgctactacgatggagagatctttcagccagaagatatcttttccgaccaccacaccatgtgctattgcgaggacggatttatgcattgcaccatgtcgggagtgccgggatcgctgctgcctgatgcggtgctgtcgtcaccgctctcgcataggtcaaagcgatccctcagctgtaggccgccgatggtgaaacttgtgtgtccggcggacaatcttagggccgaagggctggagtgcactaagacttgccagaattacgacctcgagtgcatgagcatggggtgtgtgagcggctgcctgtgtccgcctggaatggtgcggcatgagaaccggtgcgtcgctctggaacggtgtccgtgctttcaccaaggaaaggaatacgcccctggagaaactgtgaaaatcggctgcaatacgtgcgtgtgccaagaccggaagtggaattgtactgatcatgtgtgtgacgccacttgttcgaccatcggcatggcccactacctgactttcgatgggctgaagtacctgtttcctggagaatgtcagtacgtgctggtgcaggattactgcgggagcaacccgggtaccttcagaatccttgtgggaaacaagggctgttctcacccttcggtgaagtgtaagaaaagagtgaccattctggtagaaggcggcgaaatcgagctgtttgacggcgaagtcaacgtgaagaggccgatgaaagatgaaactcatttcgaagtggtggagagcggacggtacatcatccttctgctgggaaaggcgctctcagtggtttgggaccgccacctgtcaatctccgtggtcctgaagcagacctaccaggaaaaagtctgcggcttgtgcggcaacttcgacggtatccagaacaacgacctgacctcgtcgaatctgcaggtggaggaagatcccgtcgattttggaaatagctggaaagtctcctcccagtgcgcggatacgcggaaggtgccattggattcgagccccgctacttgtcataacaacatcatgaagcaaactatggtcgatagctcatgtaggatcctcacgagcgacgtctttcaagactgcaataaactggtcgacccggaaccgtaccttgatgtctgcatctacgacacctgttcgtgcgagtcaatcggtgactgcgcctgtttctgcgacactatcgccgcgtacgctcatgtgtgcgcacaacacggcaaggtagtcacctggagaaccgcgactctctgcccgcagtcctgcgaggagcgcaacctcagggaaaacggctacgaatgcgaatggcggtataacagttgcgcaccggcatgccaggtgacctgccagcacccggaacccctggcgtgccctgtccagtgcgtagaggggtgccacgcacactgtccgccagggaaaatccttgacgaactgcttcagacctgcgtggatcccgaagattgcccggtgtgcgaagtcgccggccgccgattcgcgtcgggaaagaaggtcacgctgaatccttcagaccctgagcactgtcagatttgccactgcgatgtggtgaatctgacctgcgaagcgtgccaggagccgggaggcctggtggtgccacctactgacgccccagtgtcgcctaccaccctgtacgtggaagatatctccgaaccgccactgcacgacttctactgttcacgcctccttgaccttgtgttcctcttggatggctcctcccggctgtcggaagcagagttcgaagtgttgaaggctttcgtcgtagacatgatggaacggctgcggatctcccagaagtgggtgcgggtggcagtggtggagtaccatgacggctcgcacgcctatattggactcaaagatcgtaagcggccctcggaactccgccggatcgcaagccaagtaaagtatgccgggagccaggtggcttcgacctcagaagtgctgaagtacactctcttccagatcttttcgaagattgacagaccggaggccagccgcatcaccctgctgctcatggcatcgcaggagccgcagcggatgtcgcgcaattttgtgagatacgtccagggcttgaagaaaaagaaggtcatcgtaatcccggtgggtatcgggccccacgcaaacctgaaacagattcgcttgatcgagaagcaggcacctgagaacaaagcattcgtcctcagcagcgtcgatgaacttgaacaacagagggatgagattgtctcctacctctgcgacctggcgccggaggcacccccaccaactctgccgccggacatggcccaagtgacggtgggcccgggactgctgggcgtgtcgactctcgggcctaaacgcaattcgatggttctggacgtggcgttcgtcctggagggtagcgataagatcggagaggcggacttcaatcggtccaaagagttcatggaagaggtcatccagcggatggacgtcggccaggactccatccacgtcaccgtgctccaatactcatacatggtgacggtcgaataccccttctctgaagctcagagcaaaggagacatcctgcaacgggtgcgcgagatccggtaccagggagggaaccgaaccaataccggattggccctgcggtatctgtcggatcattcgttcctcgtgtcgcagggtgaccgggaacaggcaccaaatctcgtgtatatggtgaccggaaaccctgcctcggacgaaatcaagcgcctccctggtgacatccaagtggtgcctataggagtgggtccgaacgctaatgtgcaggaattggagagaattggttggcctaatgccccgattctgatccaggacttcgaaaccctcccgcgcgaagcgccggatctggtgctgcagagatgctgctcaggcgagggactgcagattcctactctctcaccggcaccggattgctctcagccgctcgacgtgatccttctcctggatggaagctccagcttcccagcctcctacttcgacgaaatgaagtcatttgccaaagcctttatctcgaaagctaacatcggaccccgcctgactcaggtcagcgtcctgcagtacggatctatcactaccatcgacgtgccttggaacgtcgtgccggaaaaggcccacctgctgtcattggtggacgtcatgcaacgcgaaggcggacctagccaaatcggggacgccctgggcttcgctgtgcgctacctcacctcagagatgcacggggccagaccgggagccagcaaggccgtcgtcatattggtgactgatgtgtccgtggattcggttgacgctgccgcggatgcggcccgctcgaatcgcgtgactgtgttccctattgggatcggtgacagatacgacgctgcacaactccgcattttggcgggtcccgcgggtgattcgaacgtggtaaaactgcaacgcatcgaagatcttccgacgatggtcaccctgggcaactcgttcctgcataaactctgttcaggtttcgtgcggatctgcatggatgaggacggcaatgagaaaaggcctggagacgtctggaccctgcccgatcagtgccacactgtgacctgtcaacccgatggacagaccctcctgaagtcgcatcgcgtgaattgtgaccggggtttgcgcccaagctgcccaaactctcaatcacccgtgaaggtggaggaaacctgcggatgccgctggacttgcccatgcgtgtgtactgggtcgtcgacccgtcacatcgtgaccttcgacgggcagaacttcaagctgaccggcagctgctcgtacgtcctgttccagaacaaagaacaagaccttgaggttatcctgcataacggagcgtgctcgccaggggccagacagggctgcatgaagtccattgaagtgaagcattcagctctgtcggtcgaacttcacagcgacatggaggtgactgtgaatgggcggctggtgtcggttccctacgtgggaggcaacatggaagtgaacgtgtacggggccatcatgcacgaagtgcgcttcaaccatctcggacatatcttcactttcactccgcagaataacgaatttcagcttcaactgtcaccaaagacgttcgcctccaagacttatggactgtgcgggatctgcgacgagaatggcgccaacgatttcatgttgagagacgggaccgtcactactgactggaaaactctcgtgcaggaatggaccgtgcaacgcccggggcaaacttgccagccaattctggaggaacaatgcttggtgcctgactcctcccactgccaagtcctcctcctcccgctcttcgccgaatgccataaggtgctcgctcctgctaccttctacgcaatatgccagcaggacagctgccatcaggaacaggtgtgcgaggtcatcgcgtcctacgcacatctttgcagaactaacggagtctgtgtggattggcgcactcccgacttctgcgccatgtcttgcccaccgtccctggtgtacaaccactgcgagcacggatgtccacgccactgcgacggaaacgtgtcctcctgcggagatcatccgtccgagggctgcttctgcccaccagataaggtgatgctggaaggatcatgcgtgccagaggaagcctgtactcagtgtatcggagaggacggtgtgcaacaccagttcttggaggcatgggtcccagaccaccagccatgccagatctgtacttgcctgtccggaaggaaggtgaattgcaccactcaaccatgccctactgcgaaggcacctacttgcggcctgtgcgaagttgcacgccttcggcagaacgctgatcaatgctgcccagaatatgaatgcgtctgtgacccggtgagctgtgacctcccaccggtgccgcactgcgagcgcggtttgcaaccgaccctgactaacccgggtgagtgtagaccgaactttacgtgcgcctgtaggaaggaagaatgcaagcgtgtgtccccaccgagctgtccaccacacagattgccaactctgcgcaaaacgcaatgctgtgatgaatatgagtgcgcgtgtaactgtgtgaatagcaccgtctcctgcccgttgggctaccttgcatcaaccgccacgaacgactgcggatgcacgactaccacttgccttccagacaaggtgtgcgtccatcgctccaccatctacccagtgggacaattctgggaggaaggttgcgatgtgtgtacctgcaccgacatggaggatgccgtcatgggactgagagtcgcgcaatgctcccagaagccttgcgaagattcctgcaggtcaggcttcacctacgtgctgcacgagggggaatgctgcggccgctgtttgccatccgcttgtgaagtcgtcaccggttccccgaggggtgattcgcagtcctcgtggaagtccgtgggatcgcagtgggcctcaccggaaaatccgtgtctgatcaatgaatgtgtgcgggttaaggaagaagtgtttattcagcagaggaatgtgagctgccctcaactcgaagtccccgtttgcccgtccggattccagctgagctgcaagaccagcgcgtgctgcccatcctgtcgctgcgagagaatggaagcatgcatgttgaacggaactgtgattgggcccggaaagactgtcatgatcgatgtctgcactacctgccgatgcatggtccaggtcggggtgatttcgggcttcaaactggagtgtaggaaaaccacctgcaacccatgtcctttgggatacaaggaggaaaacaatacgggagagtgttgtggccggtgtctccccactgcttgtaccatccagctgcgcggcggacagatcatgaccctgaagcgggacgaaactctccaggatggatgcgacacccatttctgtaaggtgaatgaacggggagaatacttctgggaaaaacgcgtcactgggtgccctcccttcgacgaacataagtgtctggccgaagggggaaagatcatgaagatacctggcacctgctgcgacacgtgcgaggagccggagtgtaacgacatcaccgcacggctccaatacgtgaaggtgggatcgtgcaagtccgaggtggaagtcgacatccactactgccagggcaagtgcgctagcaaggccatgtactccattgatatcaacgacgtccaagaccagtgtagctgttgctccccgactcgaactgaaccaatgcaagtggccctccattgtactaacgggagtgtggtgtatcatgaagtgcttaacgctatggagtgcaagtgctcgccgaggaagtgctcgaaa

SEQ ID NO: 21293 - DNA, 8439 bp, synthetic construct
  misc_feature 1..8439: note = source = /note="Description of Artificial Sequence: Synthetic coding sequence"
  source 1..8439: mol_type = other DNA
atgatacctgccaggttcgcaggggtcctgctggcactcgcgctgatacttcccggcactctctgtgcggaagggacccggggaagatcgtccaccgcacggtgcagccttttcggaagcgactttgtcaacacctttgatggttcgatgtactcctttgcgggatactgtagttatctcttggctggaggctgccaaaagaggagcttttccattatcggggactttcaaaacggaaagcgtgtgtccctgagcgtctacttgggagagtttttcgatatccatctttttgttaacggtaccgtcacgcagggagatcaacgggtgtccatgccctacgcaagcaaaggactgtacctggagacggaagcaggttactacaaactttcaggcgaggcctacggattcgtcgcaagaatagatggatcggggaattttcaagtgctcctcagcgatagatacttcaataagacttgtggtttgtgcggcaacttcaacattttcgccgaagatgactttatgacccaagaggggaccctgacctctgacccatacgattttgcaaactcatgggcactgtcctccggtgaacagtggtgtgaacgcgcatcgccaccatcgtcgtcttgtaacatttcgtcaggcgaaatgcaaaagggactgtgggaacagtgtcagcttcttaaaagcactagcgtgtttgcaaggtgtcacccgctggtggatcctgaaccatttgtggccctttgtgaaaagaccctttgtgagtgtgctggcggccttgagtgtgcctgccccgctctgctggaatacgcaagaacttgtgctcaggaaggaatggtgctgtacggttggactgatcattccgcatgcagccctgtgtgtcctgcaggtatggaatacagacaatgcgtgtcaccttgtgccagaacctgccaatccctccacattaatgagatgtgtcaagagcggtgtgtcgatggatgctcctgtccggaaggtcaattgctcgatgaggggctttgcgtggaaagcactgaatgtccttgtgtgcattcgggcaagagatacccacctggcacctccttgagccgagattgtaacacttgcatctgtcgcaactcgcaatggatttgcagtaacgaggaatgccctggagaatgcctggtgacgggacagtcccatttcaaatcgtttgacaacaggtactttacgttttctggcatttgccaataccttctcgcacgggactgtcaggaccattcgttctcgatcgtgattgagacggtacagtgtgctgacgaccgagatgcggtgtgcactcgctcggtcaccgtgaggcttcccgggcttcacaactcccttgtgaagctgaagcatggcgccggtgtggcaatggacggccaggatgtgcaattgccactgctgaagggcgaccttcgcatccaacacaccgtcaccgcctccgtgcgcctttcatatggggaggatcttcagatggattgggacggacgtgggagattgctggtcaagctctcaccagtgtacgcaggtaaaacctgcggcctctgcggtaactacaacggtaatcagggagatgatttcctgactccatcgggtttggcagaaccgagggtggaagatttcggtaacgcatggaaactgcatggagattgtcaagatcttcaaaaacagcattctgatccatgcgctttgaatccgcgcatgaccaggttcagcgaggaggcctgcgcggtgctgacgagcccgacctttgaagcatgtcatcgtgcagtgagccccctgccataccttcggaattgccgttacgacgtctgcagctgtagcgatggccgtgagtgtctttgtggagcacttgcctcgtacgcggcagcttgcgcaggacgtggggtgcgggtcgcgtggagagaaccaggtcggtgtgaacttaattgccccaagggacaagtgtacctccagtgcggaactccgtgcaaccttacgtgtaggtccttgtcgtacccagatgaggaatgtaatgaggcatgtctggaaggatgtttctgtccacctggtctttacatggacgaaaggggcgattgtgtgcctaaagcccagtgtccttgctactacgatggagagatttttcagcctgaggacattttcagcgaccaccataccatgtgctactgtgaggatggtttcatgcactgtaccatgtcgggtgtccctgggtcgttgctccccgatgcagtcctttcatcgcctttgtcgcatagaagcaaaagatcgctttcgtgtagaccaccaatggtgaagctggtatgccctgcagacaatctgagggccgaaggcttggaatgcactaagacctgccagaattatgaccttgagtgtatgtcaatgggatgtgtgtccggatgtttgtgccctcctggcatggtgagacatgaaaatcgttgcgtggcccttgaacggtgtccatgctttcatcaaggaaaggaatacgcccctggcgaaaccgtcaagatcggttgtaatacttgcgtgtgccaagacagaaaatggaactgcactgatcatgtgtgcgatgcaacctgcagcactatcggaatggcccactacctgactttcgatggactgaaatacctttttcctggggaatgtcaatacgtcttggtccaagactactgcggatcgaacccgggcaccttcaggatacttgtggggaacaagggatgttcccacccttctgtcaagtgcaaaaagagggtgaccattctggtggaaggaggtgaaattgaactgttcgatggtgaggtcaacgtgaagcgcccgatgaaggacgaaacgcactttgaagtcgtcgagtcggggaggtacattattcttctgttgggtaaggccctcagcgtagtgtgggaccggcatctgtcgatttccgtggtgctgaaacaaacgtaccaagaaaaagtctgtgggctgtgtggaaacttcgacggaatccaaaacaacgatctgacctcatcaaacttgcaagtggaggaggaccctgtggactttggcaactcctggaaggtgagctcacagtgtgcagacacccggaaggtgcctcttgattcctcgcctgcaacttgccataacaacattatgaaacagacgatggtcgattcaagttgccgaatccttacttccgacgtgtttcaggactgtaacaagctggtcgatcctgaaccctacttggacgtgtgtatttacgacacctgttcctgcgaatccatcggagattgtgcatgcttttgtgacaccattgcagcctacgcacatgtgtgcgcacagcacggcaaggtggtgacgtggaggaccgcgaccctgtgcccccagagctgcgaagaaagaaacctgcgggaaaatggatacgaatgcgagtggcggtataactcgtgcgcacctgcatgtcaggtgacctgccagcacccagagcccctggcatgtccagtgcagtgtgtggaaggttgccatgcacattgtccccctggtaagattctggatgagctgcttcagacttgtgtcgatccagaagattgtccggtgtgtgaggtcgcaggtaggaggtttgcttccggtaagaaggtgactctgaacccctcagatcccgaacattgtcaaatctgccactgtgatgtggtaaatcttacgtgtgaggcatgtcaagaaccgggagggttggtggtgcctccaactgacgcacccgttagcccgaccactttgtatgtggaagatatctccgaacctcccctgcacgacttctactgcagcaggctcctcgatcttgtctttcttcttgacggatcatcacgactgagcgaagcagaattcgaagtgcttaaagcctttgtcgtggatatgatggaaagactgcggatatcgcagaagtgggtcagagtcgccgtggtggaataccatgacggatcgcacgcatacataggactcaaggaccggaaaagacccagcgaactgaggagaattgcttcccaagtgaagtacgccgggtcccaagtggcgtccacctcggaggtcctgaaatacaccctgtttcagatcttttcgaagatcgatcgccccgaggcatcccggattaccctgctcctgatggcatcgcaagaacctcaaagaatgagccgcaattttgtgcgttacgttcaaggccttaagaaaaagaaggtcattgttatcccagtcgggattggacctcatgcgaatcttaaacagatacggctcatcgagaagcaggcaccagagaacaaggcattcgtgctttcttcagtggatgagctcgagcaacagagagacgaaattgtgtcctacctgtgtgatcttgcccctgaagcaccaccccccacgttgcctcccgacatggcgcaggtgactgtgggaccaggcctgcttggagtgtcaacccttggtcctaagaggaattcgatggtgctcgatgtcgccttcgttctggaggggtcagacaagattggggaagccgatttcaacagatcgaaggaattcatggaagaagtgatccaacgtatggacgtcgggcaggattcaatacacgtgaccgtccttcaatactcgtatatggttaccgtggagtacccattttcagaagcacaatccaagggcgatattcttcagagagtgagagagatccgttaccagggaggtaacaggacgaatactggccttgctctgcgctacctcagcgaccattcatttttggtgagccaaggggatagagagcaagcacctaacttggtgtatatggtgaccggtaaccccgcatccgatgaaatcaagcgcctgccaggagatattcaagtggtgcccattggggtgggacctaacgcaaatgtgcaggaactggaacgcatcgggtggcctaacgcgccgatattgatccaggatttcgagactctccctagagaggcgcccgatcttgtccttcaacggtgctgctcaggagaaggactgcagattccaactctgtctccagcgcctgactgttcccaaccacttgatgtgattcttctgcttgacgggagttcttcgtttcctgcttcatacttcgacgaaatgaagagctttgcaaaagcgttcatatcaaaggccaacattggcccacgattgacccaagtctcggttcttcagtatgggagcataaccacgatagacgtcccctggaacgtggtgccagaaaaggcccatctgctgtcgctcgtggacgtgatgcaaagagaaggcggaccttctcaaatcggagatgccctgggttttgcagtcaggtatcttaccagcgaaatgcatggcgccagaccaggagccagtaaggcagtcgtcattctcgtcactgatgtgtccgtggattccgttgatgctgccgcagacgccgcacgcagcaaccgggtgaccgtctttcctattggaataggagatcgttacgatgccgcccaacttcgaatcttggccggacccgcaggcgattctaacgtggtgaaacttcaaagaattgaggatctgcctactatggtaactctgggtaattcctttcttcacaaactttgtagcggattcgtgcggatttgcatggatgaagatggtaacgagaaaagacctggcgatgtgtggactctgcccgaccaatgtcatactgttacctgtcaacccgacggccagactcttctgaaatcccatcgagtgaactgtgatagaggacttcgaccatcgtgtcctaattcacagtcccctgtgaaggtggaagaaacctgtggatgccgatggacttgcccttgtgtgtgcacggggtcgtcaactaggcacatcgtgacgtttgatgggcaaaactttaagctgaccggatcatgttcttacgtcctttttcagaataaggaacaggatcttgaagtcattctgcataacggagcatgttcgcctggcgccagacagggttgcatgaagtccattgaggtgaagcactcagcgctgtcggttgaactgcacagtgatatggaagttactgtgaacggacgccttgtttcggttccatacgtcggcgggaacatggaagtgaacgtctacggagcaatcatgcatgaggtgcgatttaaccatcttggacacattttcacgtttactccccagaataatgaatttcaattgcaactgagccctaagacctttgcatcaaaaacctacggactttgtggcatttgtgatgagaatggcgcaaatgacttcatgctgcgagatgggaccgtgaccactgattggaaaacgctggtgcaggagtggaccgtccaacgacctggacagacttgtcaaccgattcttgaggaacagtgtctcgttccagatagctcgcactgtcaagtcctgcttctgcctctttttgcggaatgtcataaagtccttgctccagcaactttctacgcgatatgtcagcaggactcctgtcatcaggaacaggtctgcgaagtgatcgcatcctacgcccatctctgtcgtaccaacggagtgtgtgtggattggagaacccctgatttctgtgcaatgtcatgtcctccttcccttgtgtacaatcattgtgaacatggttgtcccagacactgtgacggaaacgtgtcaagctgtggcgaccatccgtcagaaggttgtttttgtcctcctgataaagtgatgctcgaaggttcctgtgtgcctgaagaagcatgcacccagtgcatcggcgaggacggggtgcaacaccagtttctggaggcatgggtgcctgatcaccagccttgccaaatatgcacttgtcttagcggcagaaaagtcaattgtaccactcaaccttgtcctacggccaaggctcccacgtgtggactgtgtgaagtggcgaggcttcgtcagaatgcggatcaatgttgcccagaatatgaatgtgtgtgcgaccctgtgtcctgcgatctcccgccggttccacattgcgaaagggggctgcaacctactcttactaacccaggagaatgtagaccaaacttcacctgtgcatgtcgcaaggaagagtgcaagagagtgtccccgccgtcgtgtccaccacatcgcctgcccactctccgcaagacccagtgttgtgatgaatacgaatgcgcatgtaattgtgtcaattcaaccgtgagctgccctcttggttacctcgcgtccactgcaaccaacgattgtggttgcactaccacgacttgcctgccagataaagtttgtgtgcatcggtcaaccatctacccagtgggtcaattttgggaggaaggttgtgatgtgtgtacgtgcaccgacatggaagatgccgtgatgggcttgcgtgtggcccaatgctcccaaaagccatgtgaggactcgtgccgctcgggttttacttatgtcctgcacgagggtgagtgttgtggcaggtgccttccgtcggcatgtgaagtggtcactggttcgcctaggggtgattcccagtccagctggaagtcggtgggatcccaatgggcttcgcccgagaacccatgtctcattaacgaatgtgttcgggtgaaggaggaagttttcattcaacaaaggaatgtgtcgtgtccgcagctcgaggtgcccgtgtgcccctccggttttcagctgtcatgtaaaacttccgcgtgttgtccttcatgtagatgtgaaagaatggaagcatgtatgctcaatgggaccgtcatcggaccaggcaagaccgtcatgatcgacgtctgtactacttgtcgctgtatggtgcaagtgggcgtcatctccggtttcaagctggagtgtcgaaagacgacttgcaatccatgtcctctggggtacaaggaggaaaacaacactggtgaatgctgcgggcgctgtctccctaccgcatgcactattcaactccgcggaggacagatcatgacgctgaagcgggatgagacgcttcaagatggatgcgatactcacttttgcaaggtgaacgaaagaggcgagtacttttgggaaaagcgcgtgactgggtgtccaccatttgacgagcacaagtgtcttgccgagggaggcaagattatgaagattccaggcacttgttgtgatacctgtgaagaacccgaatgcaacgatattaccgcacggttgcaatacgtgaaggtgggatcctgtaagtcagaggtcgaagttgatattcattactgtcagggaaagtgtgctagcaaggcaatgtacagcattgacattaatgacgtccaggatcagtgctcatgttgctcgcctacccgaacggaacctatgcaagtagcactccattgcactaatggctcggtggtgtaccatgaagtgctgaacgcgatggagtgtaaatgttcaccccggaaatgttcgaaa

SEQ ID NO: 21294 - DNA, 8439 bp, synthetic construct
  misc_feature 1..8439: note = source = /note="Description of Artificial Sequence: Synthetic coding sequence"
  source 1..8439: mol_type = other DNA
atgatcccagcccgtttcgcaggagtgcttctagctctagccctgatccttccaggcacgctgtgtgcggagggcacccgagggaggagctccacagctaggtgttccctgttcggaagtgattttgttaataccttcgacggtagtatgtacagctttgccgggtactgcagctacttactggccggaggctgccagaagagaagcttctcaattatcggcgattttcaaaacggaaaacgcgtttcactatcagtgtatctgggtgagttctttgacattcaccttttcgtcaacggtaccgtgacgcagggtgatcagcgcgtcagcatgccctacgcaagcaagggattatatctggagactgaagcgggatattacaaattgagcggcgaggcttacgggttcgtcgcacgcatagatgggtctggaaatttccaggtgctgttgtctgacaggtacttcaacaagacatgtggcttgtgcggtaacttcaacatatttgctgaggacgactttatgacccaggaaggaactttgacaagtgatccatacgacttcgctaactcatgggcgttaagttcgggggagcaatggtgtgagagagcctcccccccctcctcctcttgcaacatcagtagcggcgagatgcagaagggattgtgggagcagtgccagcttttgaagagcacttcagtcttcgcacgatgtcatcctctggttgaccctgagccgttcgtggccctgtgcgagaagacgctgtgtgagtgtgcaggcggactcgagtgtgcatgccccgccctcctcgaatatgcaaggacttgtgcccaggagggtatggtcttatatgggtggaccgaccattccgcttgtagccccgtctgtcccgccgggatggaataccggcagtgcgtcagcccctgcgcccggacctgtcagagtctgcacattaacgaaatgtgtcaggagcgctgcgtggacgggtgttcttgccccgaaggtcaactgctggacgaggggctatgtgtggagtcgacggagtgcccctgtgtgcacagcgggaaaaggtacccgcctggcactagtctttctcgagattgtaatacctgtatctgccgtaactctcaatggatctgttctaatgaggagtgcccaggcgaatgcctggtgactggacaaagccactttaagtctttcgacaacaggtacttcaccttttcaggcatctgtcagtatttgcttgctagagactgccaggatcactccttttccatcgtcattgagaccgtccagtgtgctgacgatcgggacgccgtctgtactaggtccgtcacagtaaggttgccgggcctgcataatagtttggtcaaactgaagcacggcgctggcgtggcgatggacggccaagatgtgcagttgccactcctcaagggcgaccttagaatccagcacacagtgacagcctccgttcggctgtcatacggtgaggatctgcagatggattgggatggcagggggaggcttctagttaaactgtcccctgtctacgccggcaaaacttgcggactgtgtgggaattacaacgggaatcagggcgatgattttctgacaccgagcggcctggcagagcctagggtggaagattttggaaatgcttggaagctgcatggagattgccaggatctgcagaaacagcattcagacccctgcgcccttaatccccgcatgacaaggttcagcgaagaggcatgcgctgtgctgaccagcccaacttttgaggcgtgccacagggccgtgagtccactgccttaccttagaaattgccggtacgacgtgtgctcgtgctccgacgggcgggaatgcctatgcggcgcgctcgcctcttatgctgcggcctgcgctggtcggggtgtgcgggtggcctggcgcgaacccggcagatgcgaactgaattgcccgaagggccaggtttatttgcaatgcgggacaccttgtaacttgacttgcagaagtctgtcctatccagatgaggagtgcaacgaagcatgcctcgagggttgtttttgtccacctggactgtatatggacgagcggggagattgcgtgcctaaggcccagtgtccctgttactacgacggagagatattccaacctgaagacatcttcagtgatcaccacaccatgtgttactgtgaggatgggtttatgcattgcacgatgtcgggggttcctggatcactcctgccagacgccgtgctgagttcccccctaagtcatcgcagcaagcggtccctttcttgtcgaccccctatggttaaactggtctgccccgcagacaatttacgggccgaagggttggaatgcacaaagacatgccagaattatgatttggaatgtatgtcaatgggctgcgttagtgggtgtctgtgtccaccagggatggtgagacacgagaatagatgcgtagcgctagagcggtgtccttgttttcatcaaggcaaggaatacgcgcccggggagacggtgaagattggatgcaatacttgcgtgtgccaagacagaaagtggaattgcacagaccatgtctgcgacgcgacatgttctacaatcgggatggcccattatctaacttttgacggactgaagtatctgttccctggagaatgccagtatgtgttggtgcaggactactgcggcagtaatccaggaacttttagaatcctcgtagggaacaaaggctgctctcatccaagcgtaaaatgcaaaaagcgcgttacgattctcgtggaaggcggcgaaattgaactattcgacggggaggtgaacgtgaaaagacccatgaaagacgaaacacatttcgaagttgtggagagtggaaggtacataatactactattggggaaagcgcttagtgtggtgtgggataggcacctgtccatatctgtcgtccttaagcagacatatcaagaaaaggtttgcggtctgtgtggaaacttcgacggaatacaaaacaacgatctcactagttcaaacttacaggtggaagaggaccctgtggactttggtaacagttggaaggtctcttcccaatgcgccgatacccgaaaagtcccgttagatagtagtccagccacctgccacaataatattatgaagcagactatggtggactcctcttgcaggattcttacttcggacgtgtttcaggactgcaacaagcttgtggaccctgagccatatctggacgtgtgcatttacgacacttgtagttgtgaatcgattggggattgcgcctgtttttgtgataccatcgctgcctatgctcatgtctgtgcccagcacggtaaggtggtaacatggagaacagcaacactttgtcctcagagctgcgaggagagaaatttgcgcgagaacgggtacgagtgtgaatggagatacaattcttgcgcacctgcctgccaggtaacttgccagcatccggaacccctagcctgccccgtgcaatgcgtggaagggtgccatgcacattgcccacccggcaaaatcctcgacgaactcctccaaacctgcgtggacccagaggactgccctgtctgtgaagtggcggggcggcgtttcgcctctggtaaaaaggtgacattaaatccctctgatccggagcactgccagatatgccactgcgacgtcgttaacctgacctgtgaggcttgccaagagcctggcgggctcgtagtgcctcccactgatgcaccggttagtccgaccaccctgtatgtggaagacatctcagaacctcccctccatgacttttattgctcgagattgctggacctggtttttttgctggatggtagcagtcgtctctcggaggcagagttcgaggtgctcaaggcatttgttgtcgatatgatggagcggttaagaatctcccagaaatgggtaagagtcgccgtggttgaatatcatgatggctcacatgcgtatataggtctcaaggatcgaaaacgtcctagcgagctgcgtaggatcgcgtcacaggtgaagtatgcggggtcgcaagtagcctccacatccgaggtcctgaaatataccctgttccagatatttagcaagatcgaccgacccgaagcctcccggatcaccttgttactcatggcctctcaggagccccagcgcatgagcagaaactttgtacgctacgtgcagggtctaaagaaaaagaaggtcatcgtaattcctgtcggaataggtccccacgccaatttgaaacaaataagactgatcgagaagcaggctccagaaaataaagccttcgtcctgtcttccgttgacgagttggaacaacagcgggatgagatagtgtcttacctgtgtgatctggcccctgaagccccccctcccaccctgccaccagacatggctcaggtcacggtggggcctggcttgctgggtgtttctacactcggcccaaagcggaacagtatggttttagacgttgcttttgtgctggagggctctgacaaaattggggaggctgactttaatcggagcaaagaatttatggaagaggtaattcagaggatggacgttgggcaggactcaatccatgtgactgtcctgcagtactcatacatggttacagttgagtatccgttttccgaagcgcagagcaaaggagatatcctgcagcgagttagggagattagataccagggtggtaacaggactaacaccggattagctctgcgctatctgtcagatcattccttcttagtctctcagggggaccgcgaacaggcgccgaaccttgtgtacatggttacagggaaccccgccagtgacgaaatcaagcgtctaccaggcgacatacaggtggtgccgataggagtcggcccaaatgcaaacgtacaggagctggagagaattggttggcctaacgcgcccatcctgattcaggactttgagacgctgccgcgcgaagcccctgacctagttttgcagaggtgctgctcaggtgaaggactgcagattccgaccctgagccctgcgcctgactgcagccagcctctggatgttatcctcttattagacgggagctcaagctttcctgcaagttatttcgatgaaatgaagtcttttgcgaaggcatttatctctaaggcgaacattgggccaagacttactcaggtgagcgtgctccagtatggctctattaccacaattgacgttccatggaacgtcgtgccagagaaggcgcacttgctgtcattggttgacgtgatgcagagagaaggtggaccctcccaaattggggacgccttgggttttgccgtccgatatctgacctccgagatgcatggagccagacccggcgcatcaaaagctgtggtcattctggtcactgacgtgagcgtcgacagcgtggacgcagctgccgatgccgcaaggtcaaatcgggtaactgttttccctatcggaatcggggatagatatgacgccgcccagctgaggatcctggccggtccagcgggcgattcgaatgtcgtgaagctccagcgaattgaagacttgccgactatggtcaccctcggcaactcttttctccacaagctgtgctctggctttgttcgcatatgtatggatgaggacgggaatgagaagcgtcccggagacgtgtggacactaccagaccaatgccataccgtcacatgtcagcctgacggtcagaccctgctcaaatcacacagggtgaactgcgaccggggcctgaggccgagctgtcccaacagccaatccccagtgaaagtggaagaaacctgtggatgcagatggacttgcccttgcgtatgcacaggatcctccacaagacatattgtcacttttgacggccagaattttaagctgactggaagctgttcttatgttctcttccagaacaaggagcaggatttagaggtaatcctgcataacggcgcctgttctccaggagctaggcagggctgcatgaagagcattgaggtgaagcatagtgcgctcagcgttgaactgcacagcgacatggaagtgaccgtcaacggacgattagtctccgtcccttatgtaggagggaatatggaagttaacgtgtatggagctattatgcatgaggtacgatttaaccacctgggccacattttcacttttacaccccagaacaacgaatttcaactgcagctgtcccctaaaacattcgcttcaaagacttatggactctgcgggatctgtgacgaaaatggcgctaacgactttatgttacgggatggcacggtaactacagactggaagactctcgtacaggagtggaccgttcagcgcccggggcagacttgccagcctatattggaagagcagtgtcttgtgcctgactcttctcactgccaggttctcctcctgcctctgttcgcagagtgccataaggtccttgcacccgcaaccttctacgcgatatgccaacaagacagttgccatcaggagcaggtctgcgaggtcatcgctagttacgctcacctctgtcgaaccaatggagtttgtgtggattggaggacccccgacttctgtgcaatgtcttgccccccatcattagtgtacaatcactgcgagcacggttgcccccgccattgcgatggaaacgttagttcttgcggcgatcatccctccgaggggtgtttttgccctcccgataaagttatgctagagggcagctgcgtgccagaggaggcctgcacccagtgtataggtgaagatggggtgcagcaccaatttctggaggcatgggtgcccgaccatcagccctgtcagatttgcacctgtctgtccgggagaaaagtgaactgtaccacccagccgtgccctaccgcaaaggccccaacctgcggactctgtgaagttgctaggttgcggcagaacgccgaccagtgctgtcctgagtacgaatgcgtgtgtgatccagtctcttgtgacctaccccctgtgcctcactgcgagcgtggcctgcagccgaccctgactaatcccggcgagtgtcgccccaacttcacttgtgcctgccgtaaagaagaatgcaagcgggtgtctcccccctcttgccccccacataggcttcccacgctgcggaagacgcagtgttgcgatgaatacgagtgtgcatgcaactgcgtcaattctaccgtatcctgtccattaggatatctcgcttctaccgcaaccaatgactgtggttgtactaccacaacctgtttacctgacaaagtgtgtgtgcatcgatccaccatctacccagttgggcagttctgggaagagggctgtgatgtctgtacctgtactgacatggaggacgccgttatgggcctgcgcgtggcgcagtgttcgcagaagccctgcgaagacagctgtcgcagcggatttacgtatgtccttcacgagggcgagtgctgtggaaggtgtttgccaagcgcctgtgaggtcgttaccggcagccctcggggggactcgcaatcttcatggaagtccgtggggtctcagtgggccagccctgaaaacccctgccttattaacgaatgtgtccgcgtcaaagaagaagttttcatacaacagcgaaacgtttcatgtccacagctggaggttcccgtgtgcccatccggttttcagctgtcctgtaagacttctgcctgctgtccctcttgtcgctgcgagcgaatggaggcctgcatgctcaacggcaccgtcatcggccccggaaagaccgttatgattgatgtttgcactacctgccgctgcatggtgcaggtgggcgtgatctctggatttaagttggaatgcaggaagacaacctgtaatccatgccccctaggttacaaagaagaaaacaatactggcgaatgctgcggcagatgcttacctaccgcatgcaccatccagcttagaggcggccagatcatgaccttgaagagggatgaaacccttcaggatggttgcgacactcacttctgcaaagtcaacgaacggggggaatacttctgggagaaacgcgtgacaggctgccctcccttcgacgaacacaagtgtctggccgaaggggggaagattatgaaaatccctgggacctgctgcgatacatgtgaagaacccgaatgcaatgacatcacggcccggctgcagtatgtgaaggtggggtcatgtaagtcggaggtggaagtggatatccactattgtcagggcaagtgtgcctccaaggctatgtactccatagatataaacgatgtacaagatcagtgctcatgttgctcccctacgagaacagagcccatgcaggtcgctctgcactgcacaaacgggagtgtggtgtaccacgaggttctgaatgccatggagtgcaagtgttcgcctaggaagtgtagtaag

SEQ ID NO: 21295 - DNA, 8439 bp, synthetic construct
  misc_feature 1..8439: note = source = /note="Description of Artificial Sequence: Synthetic coding sequence"
  source 1..8439: mol_type = other DNA
atgatccccgccagattcgccggcgtgctgcttgccctcgccctgattcttccaggaacactgtgcgcggagggcacccggggtcgatccagcaccgcccggtgctccttattcggcagcgatttcgtcaatacgttcgacggaagcatgtacagtttcgccggttattgctcttatctcctggccggcggatgccagaagcggagctttagtattatcggggattttcaaaacgggaagagagtgtcgctctccgtgtatctgggtgaattctttgatattcatctgttcgtgaatggcacagtgacacagggggatcaacgcgtaagcatgccctacgcaagcaaggggctttatctcgaaactgaggcaggatactacaagctgtcaggggaggcatacggatttgtggctcgtattgatggctcaggtaactttcaagttctactgtccgatcggtattttaacaagacttgcggactgtgcggcaactttaatatcttcgctgaggatgacttcatgactcaagagggtacattgacttctgatccctatgactttgcaaacagttgggctctgtcatctggcgagcagtggtgcgaacgggcgtctccaccaagctcttcttgcaatatttccagcggggagatgcagaaaggcctttgggagcagtgtcagttgttgaagtccacttcagtattcgcacgctgtcaccctctagtggacccggagccctttgtagcactgtgcgaaaaaaccctgtgtgagtgcgccgggggcctggagtgtgcgtgccctgcactgctcgaatacgctcggacctgcgctcaggagggtatggttttgtacggttggaccgaccatagcgcatgttcccccgtctgcccagcgggcatggaataccgccagtgcgttagcccatgtgcacggacttgtcagtccctgcatattaacgagatgtgtcaggagcggtgcgtggacgggtgtagctgtcccgaaggacaactgctggatgagggcctgtgtgtggagtcgaccgagtgcccctgcgtccattccggcaaaagatacccccccggcacctcacttagcagggattgtaatacttgcatttgtcgaaactcacagtggatatgctctaatgaggagtgccctggcgagtgtctggtgactggccagtcgcatttcaaaagtttcgataacagatatttcacattttccggcatctgccagtacttgctggctcgtgactgccaggaccactctttctctattgttatcgagaccgtgcagtgcgcagacgacagggatgccgtgtgtaccagatctgtgacagtaagactccctggcttacacaactctctggtaaagctgaagcacggggctggggtggctatggatggacaggacgtgcagttaccattgttgaagggtgatctgcggattcaacacactgttacagcctctgtgaggttgtcctatggagaagatttacagatggattgggatggtagggggcgcctactggtgaaactaagcccggtgtatgctggaaaaacctgtgggctttgcggtaattacaatggaaatcaaggtgatgactttctgacaccttctggccttgccgagcctcgcgtcgaggattttggcaacgcttggaaactccacggtgactgccaggatttacaaaaacaacatagcgatccttgcgccctgaacccacggatgacccgcttttccgaagaggcctgtgccgttctgacatcaccaaccttcgaagcttgccaccgcgccgtgagtccgctgccataccttagaaattgcaggtatgacgtttgcagttgctctgatggcagagaatgtttatgtggcgctctggccagctatgctgcagcctgcgccgggcgcggagtgcgcgtggcctggcgggagcctgggcgctgtgaactaaactgcccgaagggacaggtttatcttcagtgcgggactccatgtaacctgacatgtcgctctctatcctatccggacgaggagtgtaacgaggcttgtctcgaggggtgcttctgtccgccaggactgtacatggatgagaggggcgattgcgttcctaaagcgcagtgcccttgttattatgacggcgaaatcttccagccggaggatatctttagcgaccaccacaccatgtgttactgtgaggacgggttcatgcactgtactatgagtggagtgccagggtctttactccccgacgcagtgctgtcctctccactgagccatcgctcgaagcgatcattgagttgcaggcctccaatggttaagcttgtgtgcccagccgataatcttcgcgctgagggcctcgagtgcaccaagacctgtcagaattacgatctagagtgtatgagcatgggatgtgtgtctgggtgtctttgccctccggggatggttcggcacgagaaccgctgcgtggcacttgagcgctgtccctgttttcaccagggcaaggagtacgcaccaggcgagactgtaaaaattgggtgtaacacgtgcgtctgtcaggacaggaagtggaactgcacagaccatgtatgcgatgctacttgttctacaatcggaatggctcactatctgacatttgatggtctcaaatatctgttccccggggaatgccagtacgtcctggtccaagattattgcgggagtaacccaggcacatttcggattctggtggggaacaaagggtgtagtcaccctagtgttaagtgcaagaagagggtaacaattttggtggagggaggagaaattgaactcttcgatggggaggtaaacgtgaagcgccccatgaaagacgagacccattttgaagttgtcgaatccggccgctacatcatcctgctgctcggtaaggccctaagcgtggtttgggatagacacctatctattagtgtggtgctgaaacagacctaccaggagaaagtgtgcgggttgtgcggtaattttgatggaatccagaacaacgacctcacatcgagcaacttgcaggtcgaggaggatcccgtggatttcggaaattcttggaaagtgtcatcccagtgcgctgataccagaaaggtcccgttagattctagccccgccacttgtcacaataacatcatgaagcagacaatggttgatagctcttgccggattctgacgtccgacgtgttccaagattgcaataaactcgttgacccagaaccctacctggacgtctgtatttacgatacctgctcatgcgagagcatcggagactgtgcttgcttttgcgataccatcgccgcctatgctcacgtttgcgcgcagcacggaaaggtggttacgtggagaacggctacgctgtgcccccagtcctgtgaggaacgaaatctccgagagaatggctacgagtgcgagtggcgctataattcttgcgctccagcatgccaggtgacctgccagcacccggagccattagcatgtccagtccagtgcgttgaaggatgccacgctcactgtccaccaggcaaaatcctggatgagctgttgcaaacctgtgtggaccctgaagattgtcccgtgtgcgaggtggccgggagacgattcgcctccggcaagaaggtcacattaaatccttccgatccagaacactgtcaaatctgtcattgtgacgttgtcaacctgacatgtgaggcttgtcaggagcccggcggtctggttgtgccaccaactgatgcgcctgtgtccccaaccactctctacgtagaagatatatccgagcctccgctgcatgacttctactgttctagactcctggatctcgtgtttttgctggatggctccagccgcctgagcgaagcggagttcgaagtgctcaaggcattcgtcgtggatatgatggaaagattgagaatttcccagaagtgggtccgggtggccgtggtcgaatatcacgatggctcccacgcctatattggtctgaaggacagaaagcggccgtccgaactgagaagaattgcctctcaggttaagtacgctgggtcccaggtcgctagcacctccgaagttctgaagtatactctgttccagatattctctaagattgaccgcccggaggcaagtcggataacactcctcctgatggcatcacaggaaccccagaggatgtccagaaatttcgttcgatacgtccaaggcctcaagaagaaaaaagtgattgtcattcccgtcggtataggtccccacgcaaatctaaagcagatccgtctgatcgagaaacaggcacctgaaaataaggcgtttgtgctaagtagtgtagacgagctggagcaacaacgagatgagatagtgtcctacctgtgcgacctggcccctgaagctcccccacctacacttcccccagacatggcccaagtcacggtaggaccggggctcctgggggttagcactttggggcctaaacggaacagcatggtcttagacgtcgcctttgttttggaaggatctgacaaaatcggtgaggccgactttaatcgaagtaaagagttcatggaggaagtgattcagcggatggatgtgggccaggactccatacacgtaaccgtcctgcagtactcctatatggttactgtggagtaccctttttcagaagcacagtccaagggagacatacttcagcgggtgcgcgagatacgatatcagggaggtaatcggacaaataccggcctcgcgctgcggtacctaagtgatcactccttcttggtcagtcagggggaccgcgaacaggcaccaaacttggtgtacatggtcaccggaaatcctgcctctgatgaaatcaagcggctgccaggcgacatccaggttgtgcccattggcgtcggtcccaacgccaatgtgcaggagttagaaagaatcggctggcccaacgcacccatcctaattcaggactttgaaactctgcctcgggaagcaccagatctggtgctgcagaggtgttgtagtggtgaaggtctacagatccctacactgtctccagcacctgactgttctcaaccgttggatgtaatacttttgctcgatggctcgtccagcttcccagctagttacttcgacgaaatgaaatctttcgctaaagctttcattagcaaggctaatatcggtcctagactcactcaggtttcggtacttcagtacggctcaataactaccatcgacgtgccgtggaacgtagtgcccgagaaggcgcacctcctgagtctcgtagacgttatgcagcgcgaaggtgggccgtcccaaattggcgacgctttgggatttgccgttcggtatttgaccagcgagatgcacggggctcggccaggcgcttccaaggctgtggtgatcctagtcacagacgtgagcgtggatagcgtcgatgccgcagctgatgcagctaggtcgaatcgggttaccgtgtttcccatcggaatcggagatcgatacgacgccgctcaactcagaatcttggccggccctgctggggattctaatgtggtaaagctccagcgcattgaggaccttcctacaatggttaccctcggaaactcattcctgcacaagctctgcagtggattcgtgcgaatttgtatggacgaggatggaaacgagaagagaccaggggacgtgtggacactgcctgaccagtgccacacggtcacctgtcaacccgacgggcagacattgttgaaaagtcatcgggttaattgcgacagaggcctgcggccatcttgccctaattcgcagtcaccagtcaaggtggaggagacttgtggctgcaggtggacgtgcccctgcgtgtgtacgggatcctccactcggcacatcgtgacatttgatgggcagaactttaagctaaccgggagctgttcctatgttctgttccagaacaaagaacaggacctggaggtgattctgcacaatggcgcttgtagccccggcgcccggcaaggatgtatgaagtctatagaagtaaaacacagcgcactctctgtcgaattgcactctgatatggaagtgaccgtgaacgggcggcttgtcagcgtgccctacgtaggcgggaatatggaggtgaatgtatacggcgcgatcatgcatgaggtgcgcttcaatcacctcgggcacatctttactttcaccccgcaaaataatgagttccagctgcaactctctcctaagacatttgcatcgaagacttacggtctgtgtggaatttgcgacgaaaatggagctaacgacttcatgctacgggatggaaccgttacaaccgactggaaaacgttggttcaggagtggacagtgcagcgcccaggacagacgtgtcagccaatactggaggagcagtgccttgttccagacagcagtcattgtcaagtcctgctgcttcctctatttgccgagtgtcataaagtactagctccagccacgttttacgccatctgtcagcaggattcatgccaccaggagcaggtttgtgaagtgatcgcgtcttacgcgcacctgtgtagaactaacggggtgtgtgtcgactggagaactcctgacttctgtgcaatgagctgccccccatctcttgtttataaccactgtgaacacggttgcccacgtcactgcgacggaaatgtcagctcttgcggagaccacccctctgagggttgcttctgcccgcccgataaagtcatgctggaaggtagctgcgtaccagaagaagcctgtacgcaatgtattggagaggacggtgtgcagcatcagttcctggaggcctgggtgcctgatcaccagccctgtcaaatttgtacttgcttgtcgggcagaaaggtcaactgcaccacccagccttgccctacggcgaaagctcccacatgtgggctatgcgaagtcgcccgtctccgacagaacgcggaccaatgctgccccgagtacgaatgtgtttgcgatccggtgagttgtgacctgccacccgtacctcactgtgagcggggcttacaacccaccctgactaatccaggagagtgccggccgaactttacttgtgcttgccgcaaagaagagtgcaaacgtgtgtctcccccgagctgccctccgcacaggctgcctacgttgcgcaagactcagtgctgcgatgaatatgaatgcgcatgcaactgtgtgaacagtaccgtaagctgtccccttggatacctggcttctacggccacaaacgactgtggatgtaccacgaccacatgcctaccagacaaggtgtgcgtgcatagatcaactatttaccccgtgggacagttttgggaggagggttgtgatgtgtgtacatgcaccgatatggaagacgctgtgatggggctgcgagtggcacagtgttctcaaaaaccctgcgaagatagctgtaggagcggctttacctatgtactgcacgagggggaatgttgtggacgatgccttccgtccgcctgcgaggtagtgacaggttctccccggggcgactctcagtccagctggaaatcagtgggaagccaatgggcatcccccgaaaacccctgcttaattaacgagtgcgttagagtgaaggaagaagtcttcatacagcagcggaatgtcagctgccctcaactcgaagtccctgtgtgtccctcagggttccaactgtcttgcaagacctccgcctgctgcccttcttgtcggtgcgaacgcatggaggcctgcatgttgaatggcacagtcatcgggccaggcaagactgtcatgattgacgtctgtactacttgtcgttgtatggtgcaggtgggtgtcattagcggttttaagttggagtgtagaaagacgacgtgcaacccctgtcctctgggctataaagaagaaaacaatacgggtgaatgctgcggcaggtgcctcccaacagcatgcaccattcagctgcggggaggccaaatcatgactctgaaaagggacgaaacactccaggatggttgtgacactcacttctgtaaggttaacgaacgcggagaatacttctgggagaagcgcgtaacggggtgcccacccttcgacgagcacaaatgcctggccgaaggaggaaagattatgaagatacctggcacctgttgcgacacgtgtgaggaaccggagtgtaatgatattacagcccggctgcagtacgtcaaagtggggtcttgtaaatccgaggtcgaggtggacatccactattgtcaggggaaatgtgcctcaaaagccatgtacagcattgatataaacgacgtccaggaccagtgttcctgttgctcgcccacacggaccgagcctatgcaggtcgcacttcactgtactaacggttcagtggtctaccatgaagtgctcaacgctatggaatgcaagtgtagtccccgcaaatgcagcaaa

SEQ ID NO: 21296 - DNA, 8439 bp, synthetic construct
  misc_feature 1..8439: note = source = /note="Description of Artificial Sequence: Synthetic coding sequence"
  source 1..8439: mol_type = other DNA
atgatccctgcacgattcgccggcgtgctgctggctctcgcgctgatcctgccaggcacgctctgcgccgaaggaacccgcgggagaagcagtacagctcgatgcagcttattcggctctgatttcgtgaacacctttgacgggagcatgtatagcttcgccgggtactgttcttatctgctggcaggagggtgccagaaacggagcttctctatcattggcgatttccagaacgggaaacgtgtcagcctgtcagtctacctcggggagtttttcgatattcacttgttcgtgaatggaacagtaacacagggtgaccaaagggtaagcatgccctatgctagcaagggattgtatctggaaacagaggccggctactacaaattgtctggagaggcatatggctttgtggcccgtattgatggttcagggaactttcaggtgttactcagcgataggtatttcaacaaaacgtgtgggctctgtggcaacttcaatatttttgctgaagatgactttatgacgcaggaaggaaccttgaccagtgatccctacgacttcgcaaattcatgggccttgtcttcaggtgaacagtggtgcgagagggcctccccgccaagctcttcatgcaacatatcctccggcgaaatgcaaaaaggcctgtgggaacagtgccagctgctgaaatcgacttccgtcttcgcccgatgccatcctctggtggatcccgagccattcgtggctctgtgtgagaaaaccctatgtgagtgcgctgggggtctggaatgtgcctgccctgccttgttggagtatgctcgcacatgcgcgcaggaaggcatggtgctctacgggtggacagatcatagcgcgtgtagccctgtctgcccagctgggatggagtacaggcagtgtgtgagcccctgcgccagaacctgtcagtccctgcacataaatgaaatgtgccaagagagatgcgttgatggctgtagctgtcctgaggggcagctcctggatgaaggcttatgtgtggagtctacagagtgtccttgtgtccattcagggaagaggtacccccccggtacgagcctctctagggattgcaatacctgtatctgcaggaattctcagtggatttgttctaacgaggaatgcccaggagaatgcctggtcactggacaatcccatttcaagagttttgacaatagatactttaccttttccggaatctgccagtacctgcttgcccgggactgtcaggatcactccttctcgatcgtgattgaaaccgtgcaatgcgccgatgaccgagacgcagtctgtacacggtccgtgaccgtacgactgcccgggctgcacaactccctcgtcaaacttaagcatggcgctggagtcgccatggacggccaggatgtgcagctgccactgctcaagggagatctgagaattcagcacaccgtaacagcctctgttcgactgagctatggcgaggacctgcagatggattgggacggccggggcaggctacttgtgaaattgtcacctgtctatgcagggaagacatgcggactgtgtgggaattacaatggtaaccagggggatgactttctgaccccatcgggcctcgcagagccccgagtggaagactttgggaacgcttggaagctgcatggcgattgtcaggacctgcagaagcagcactccgatccgtgtgctctgaacccccgtatgacaagattctccgaggaggcatgcgcagtgctaacatcccccacattcgaagcctgccatagggccgtgagccccctcccatacctgaggaattgcaggtacgatgtttgttcatgttctgatggcagagaatgcctatgcggggctttggcctcttacgccgccgcttgtgcagggcgaggtgtgcgagtagcttggagggaaccggggaggtgcgagttgaattgtcccaaagggcaggtctacctgcagtgcggtacgccatgtaatcttacctgccgaagtctgtcataccccgatgaggagtgcaatgaggcctgcctcgaagggtgcttctgccccccaggtctatatatggacgaaagaggcgattgcgtgccgaaggcacagtgtccttgttactatgacggggaaatctttcagccagaagacattttctcagaccatcacaccatgtgttattgcgaggacggtttcatgcactgtacaatgagcggggttccaggatctcttctccccgacgccgtgctttcaagcccactctcccatagatctaaaagatctctgtcatgtaggccgcccatggtgaagctggtttgtcctgccgacaatttgcgagccgagggcctcgaatgtaccaagacctgccagaattacgatctcgagtgcatgtctatgggttgcgtgtctggctgtctgtgtcctccaggtatggtgcgacacgaaaatcgctgtgtcgccctcgagaggtgtccctgttttcaccaggggaaggagtacgctccaggcgagacggtcaagatcggatgcaatacgtgtgtttgtcaggaccgaaaatggaactgtaccgatcacgtctgtgacgcgacttgttccactatagggatggcgcactacctgacgtttgacggtttgaagtacctgttcccaggcgaatgtcagtatgtccttgtacaagattactgtgggagtaatcctggcacattccgaatcctggtcggaaataaaggctgcagccacccttcagtgaagtgtaaaaaaagagttacaattctcgtggaggggggagagatcgaactctttgacggggaggtgaatgtcaagcggcccatgaaggacgaaacccatttcgaggtggtggagagtggccgatatattatactgctgcttggtaaagccctgagcgtggtgtgggaccgccacctgagtatcagcgtcgtgctgaagcaaacctatcaagaaaaggtgtgcggactttgcgggaatttcgacggcatacaaaataatgatctaacttcaagtaacctgcaagtagaagaggatcccgtcgatttcgggaacagttggaaagtgtcgtcccagtgcgctgacactagaaaggtgcctcttgactccagcccggccacctgtcataataatattatgaagcaaaccatggtcgatagctcctgcaggatcctgacaagtgatgtcttccaggactgcaataaactggtcgatcctgagccttaccttgacgtttgcatatatgatacatgtagctgcgagagcatcggggattgtgcctgcttctgtgacaccatcgcggcttacgctcacgtctgtgcccagcacggaaaggtagtcacctggaggacagcaaccttgtgtccccagtcctgcgaagaaagaaatctgcgagaaaacggctacgaatgtgaatggaggtataatagttgcgccccagcatgccaggtcacatgccagcatccagaacctctggcttgtcctgtacagtgcgtggaaggctgccacgcacattgccccccaggaaaaatcctagacgaactcctgcagacctgtgtggatcccgaggattgccctgtctgcgaagtagccggaagaaggttcgccagtggaaaaaaagtgactctgaacccatccgacccagaacactgccagatctgtcactgcgacgttgtcaacctaacttgtgaagcgtgtcaggagccgggcggactggtggtgccccccaccgacgcccccgtgagcccaactacgctctacgtggaggacattagcgagccccctctccacgacttttactgttcacgattgctggatctggtgttcctgctggacgggtcttccagactcagcgaggccgaattcgaagtgctgaaagctttcgtcgttgatatgatggaaagacttaggatcagccaaaaatgggtcagagtggcagtcgtggaataccacgatggtagccacgcatacatcggtctgaaggacagaaaaagaccctctgaactaaggcgaattgcttctcaagtaaagtacgcaggttcccaagtggcgtccacctctgaagtgctcaagtacacactgttccaaatattttctaaaattgatcgaccggaggcctccagaattaccttgctgctgatggcctcccaggagccacagaggatgagccgaaattttgtgcgctacgtgcagggcctcaaaaaaaaaaaggtaatcgtcatcccagtggggatcggtccccatgcaaatctgaagcaaatcaggcttatagagaagcaggctcctgaaaacaaggcttttgtgctatcaagcgtggatgaactcgagcagcagagggacgaaatcgtgagctacttgtgtgacctggctcccgaggccccccccccaacgctgcctccagacatggcacaagtgacagtcgggcccgggctcctgggggtctctaccctcggccctaagcgtaatagtatggtgctagacgttgccttcgttcttgaaggttctgacaaaattggcgaagctgactttaacaggagcaaagagtttatggaagaggttattcagagaatggatgtcggacaggactcaatccatgtaaccgtgcttcagtactcctatatggtgacagtagagtacccattttccgaggctcagtctaaaggggacatcttgcaacgagttagggagatccggtaccagggaggcaatagaactaacacaggtcttgcactcagatatctgagcgatcattctttcctcgtgagccagggcgaccgagagcaggcaccaaatttggtgtacatggttacaggaaacccagcttctgatgaaattaaacgtttacctggggacattcaggtggttccaatcggcgtggggcccaacgctaatgtacaagaactcgaacgaattgggtggccaaacgcacctattttaattcaagattttgagactctgccaagggaggcaccagatctcgttctgcagaggtgctgtagcggtgagggcctccagatccctaccctgagccccgccccagattgcagtcagccgttagacgtgattttgctccttgacggcagtagcagctttcccgcttcttatttcgacgaaatgaagtcatttgccaaagcctttatctcaaaggcgaacatcggtccaagactgactcaggtgtctgtcttgcaatacgggtctataactaccatcgacgtgccctggaatgtggtgccagaaaaggcacacttgctgagcctcgttgacgtgatgcagcgagaaggcggaccatctcagattggtgacgccctcggcttcgccgtgaggtacctgactagtgaaatgcatggcgcccgcccaggggcatctaaggcggtggtcatcctggtgaccgacgtgagcgtagacagcgtcgacgcggccgctgacgccgccagaagtaacagggtcacagtcttcccgattgggatcggtgataggtacgacgctgcgcaactgaggatcctggctggtccagccggagattctaacgtggtgaaactacagaggatcgaggatttgcctaccatggtgacgctcggcaactcttttctccacaaactctgcagcgggttcgttaggatctgtatggatgaggatggtaatgaaaagaggcccggagatgtctggacactccccgaccagtgccacacagtaacatgtcagcctgatggtcagacactcctgaagagccaccgagttaactgcgacaggggcctgagaccctcctgtccgaattcccagagccctgtcaaggtggaagagacctgtgggtgccgatggacctgtccctgcgtgtgtactgggtcctcgacaagacatatcgtgacgtttgacggtcagaattttaaattgacgggcagttgcagctatgtgctgttccagaacaaagaacaggacctggaggttatactgcacaatggcgcctgcagcccaggtgcaagacagggctgtatgaaaagcatagaggtcaaacacagcgctctgtccgtggaactccatagcgacatggaggtgaccgtgaatggcaggcttgtgagtgtgccttacgtgggaggcaatatggaagtgaacgtctacggcgccattatgcatgaagtgagatttaatcacctaggacatatcttcacctttacaccgcaaaacaacgagttccagctgcagctgagcccaaagacatttgccagtaaaacatatggcctatgcgggatctgcgatgaaaacggagctaacgatttcatgctgagggacggtactgtaacaactgactggaaaactttggtccaagagtggactgttcaaaggcctggacagacttgccagcccatactggaagagcagtgccttgtcccggattctagccattgtcaggttcttctactcccactgttcgcagagtgtcacaaggtgcttgcacccgctacattttacgccatttgccaacaagacagctgccaccaagaacaggtctgtgaggtcatagctagctacgctcacctctgtaggaccaacggcgtgtgcgtggattggcgcaccccagatttctgcgccatgagctgtccccccagtctggtttataatcattgcgaacatggctgcccacggcattgtgatgggaacgtctcatcctgcggtgaccatccgagtgagggatgcttttgtccccccgataaggtgatgctggaaggtagctgcgttcctgaagaagcctgtacacagtgcataggcgaagacggcgtgcaacaccagttcttggaggcttgggttcctgaccatcagccatgccagatttgcacctgtctctctggacgaaaggtgaactgtactacccagccttgtccaacagctaaggccccaacgtgcggactttgtgaagttgcgaggctgcggcagaacgcggatcaatgctgcccggagtatgaatgcgtgtgcgaccccgtatcttgcgacctccctcctgtgccccactgcgaaagaggcttacagcccactctgacgaatccaggcgaatgtcgtcccaacttcacatgcgcatgccgaaaggaagagtgcaagagagtctcccccccttcatgtccgccgcatcgattgcccaccttgaggaaaactcagtgctgtgacgaatatgaatgcgcttgcaattgtgtgaacagtaccgtgagctgtcctctcggatacctagcgagcacggctacgaatgactgcggctgtaccaccaccacctgtctcccagataaggtgtgcgtacatagaagcacaatctatcccgtgggacaattctgggaagagggatgcgatgtgtgtacttgcactgacatggaagatgccgtgatgggccttagagtggcccagtgctcccagaagccctgtgaagacagttgcaggagcggttttacatacgttctacatgaaggggagtgctgcgggcgatgtctgcccagtgcgtgtgaagtcgtgactggatcacctcgaggcgactcccagagcagttggaagagtgtcggatcacagtgggcgtctcctgagaacccctgcctaattaacgagtgcgtgcgagtcaaagaagaggtgttcatccagcagcgaaacgtttcttgtccccagctggaggtccccgtctgtcccagtggtttccagttgtcctgcaagacctcagcctgttgccctagctgcaggtgcgaacgaatggaggcatgcatgcttaacggcacagttattggacccggaaagacagttatgatcgacgtctgtacaacttgccgatgcatggtacaggtgggagtcatctcaggtttcaagcttgaatgtagaaagacgacctgcaatccgtgccccctgggttataaagaggagaacaacactggcgaatgttgtggccgatgccttcccacggcttgtaccatacagcttcgaggcggacagattatgacgctcaagagggacgagactttgcaggatggctgtgatacccacttctgcaaggttaacgaaagaggcgaatacttctgggagaaacgcgtcactggatgccccccttttgatgagcacaaatgtctagcggagggtggaaaaatcatgaagatccctgggacatgctgtgatacatgcgaagaacctgaatgcaacgacataaccgctcgcctccagtacgtcaaggtgggatcctgcaagagcgaggtggaagtggatattcattactgtcaaggcaaatgcgccagcaaagctatgtatagcattgacatcaatgatgtgcaggatcagtgtagctgttgcagtcctaccaggacagaacctatgcaggtggctctgcactgcaccaacggttccgtggtctaccatgaggtcctgaacgcaatggaatgcaaatgctctcctcgaaagtgcagtaaa

SEQ ID NO: 21297 - DNA, 8439 bp, synthetic construct
  misc_feature 1..8439: note = source = /note="Description of Artificial Sequence: Synthetic coding sequence"
  source 1..8439: mol_type = other DNA
atgatccccgctagatttgcaggcgtgctgttagccctggcccttatactgcccgggacgctgtgtgctgaaggtactagaggcaggtcctctactgctcgctgctccctgtttggttccgactttgtcaacactttcgacggaagcatgtattcgtttgccggatactgctcgtacctgctggcaggcggctgtcagaagagatcattttctatcatcggggattttcaaaatggcaaacgcgtatccctgtccgtctatctgggtgaattcttcgatattcacctgtttgtgaacggcacagtaacccagggtgatcagagagtgagtatgccatacgcttcaaaggggctgtacctagaaaccgaagccggttattataagttgagtggggaagcctacggttttgtcgcccgcattgatggcagcggaaacttccaggtgctccttagcgaccggtacttcaataaaacgtgtggcctctgtggaaacttcaacatcttcgcagaagacgacttcatgactcaagaagggacactgacgtctgatccatatgattttgcaaatagctgggcattaagctccggggagcagtggtgtgaaagagcgagcccaccctccagttcctgcaatatctcttccggggaaatgcagaaaggactgtgggaacaatgccaattactaaagtccacttctgtatttgcacggtgccaccctctggttgatcctgaacctttcgtggccctatgcgagaagacgctgtgtgagtgtgctggcgggctggaatgtgcatgtccggctttactcgaatacgccaggacctgcgctcaagagggtatggtcctatacggatggaccgatcacagcgcttgcagcccggtgtgtcccgctgggatggagtaccgccagtgcgtctccccttgtgctcgaacgtgtcagagccttcatatcaatgagatgtgccaggaaaggtgcgtcgacggatgctcctgcccggaagggcagctgctcgacgagggcctctgcgtggaaagtacagagtgcccgtgtgttcactcgggcaaaagatacccccccgggacatcgctctctagggactgtaacacgtgtatttgccgcaactcacaatggatctgtagtaacgaggaatgcccaggagagtgtttggttacaggccagagccacttcaagagttttgacaaccggtattttactttttcaggaatctgccagtatttgctggcacgggactgccaagaccattccttctcgattgtcattgagaccgtgcagtgtgccgacgatcgggacgccgtctgtactcggagtgtgactgtgagactacccggtttgcacaacagcttggttaaactcaagcacggcgccggcgtcgcaatggatggacaggacgtgcagcttccattactaaagggggacctgcgcatacaacatacagtgaccgcaagtgtgcgccttagctatggcgaggacctgcagatggactgggacggcaggggcagactactggtgaagctgtctcctgtgtacgctggcaaaacttgcgggctgtgtggcaattacaatggaaaccagggcgatgacttcttgacaccaagtggtctagccgagcctcgcgtcgaggatttcgggaacgcctggaaactgcacggcgactgtcaggatcttcagaagcagcattccgacccatgcgcacttaacccacgaatgactcgcttttctgaggaagcctgcgcagttctgacttcccccacgttcgaagcctgtcacagggccgtgagccccttaccatacttgcggaattgtcgctacgacgtctgcagttgtagtgatggacgcgagtgcctgtgtggggccttagctagttacgccgccgcgtgcgccggccgcggagtccgcgttgcctggagagagccaggacggtgtgagctgaattgtccaaagggtcaggtgtacttgcaatgtggtactccgtgtaatctaacgtgtagatctctctcataccccgatgaagagtgtaacgaagcttgcctggaaggctgtttctgcccgcccgggttgtacatggacgaacggggcgattgtgtacccaaggcccaatgcccttgctactatgacggcgagatatttcaaccagaggacatcttttctgaccatcataccatgtgctattgcgaggacggattcatgcactgtacgatgagtggcgtacctggctctctgcttccagatgcagtgttaagcagccctctgtcacacagaagcaagaggtctctgtcctgccgacctcccatggtcaagctggtgtgccccgcagacaacttgagagctgaggggctcgagtgtactaaaacatgtcagaattacgaccttgaatgcatgtcaatgggatgcgtgtctggttgcctgtgtcctcccggcatggtgagacacgaaaatagatgtgtggcgctggagaggtgcccatgctttcaccagggaaaagagtatgcccctggcgaaacagtcaaaatcggctgcaacacatgtgtttgtcaggatcggaagtggaactgcactgaccacgtgtgcgatgcaacttgctccaccatagggatggcccattatctgacttttgatgggcttaagtatcttttcccgggggaatgtcaatatgtgctcgtccaggattactgtgggtccaatccaggcacattcaggatcttggtggggaacaaagggtgctcccacccatctgtcaagtgtaaaaagcgggtgacaattctagtagagggcggcgaaattgagttgttcgacggtgaggtgaatgttaaacgccctatgaaggacgaaacacactttgaggtggtagagagcgggaggtacataatcctcctgctgggaaaggcgttgtccgtggtttgggaccggcacctgagcatctctgtcgtattaaagcagacgtaccaggagaaagtatgtggtttgtgtggaaatttcgacgggatccagaataatgatttgacttcctctaacttacaggtagaggaagatcctgttgatttcggcaattcatggaaggtgagtagtcaatgcgcagacacacggaaggttcctctggattcaagccccgccacatgtcacaataatattatgaagcaaacaatggtagacagctcatgtcggatcttgacctcagatgtgtttcaggactgtaacaaattggtagatcctgagccgtacttggatgtgtgtatctatgacacctgctcctgcgaatccattggggattgtgcttgcttctgtgataccattgctgcgtatgcacatgtatgtgcgcagcacgggaaggtggtaacctggagaacggctacactgtgccctcagtcatgtgaggagagaaacctccgagaaaatggctatgaatgtgaatggcgttacaatagctgtgcacccgcctgccaggtcacctgtcagcaccccgaacccctggcttgcccagtgcagtgcgtcgaagggtgtcacgcccactgccctcccggtaaaattctggacgaacttcttcaaacctgcgtcgaccccgaggattgccctgtctgtgaagtagctgggagacggtttgcttccggcaagaaggttacattgaacccctctgatccagagcactgtcagatttgtcactgtgatgtggtgaacttgacctgcgaagcttgtcaggaaccgggggggctggtagtgcctccgaccgatgccccagtgtccccaactaccttatatgtggaggatatctccgagccacctttacacgacttttactgttcacggctgctggaccttgtgtttctcctggatggctcctcacgtctctctgaggcagagtttgaggtcctaaaagcttttgtcgttgatatgatggagcgcctgagaatcagccaaaaatgggtgcgtgtggctgtcgttgagtaccatgacggctcgcatgcatacattggactgaaggacagaaagcggcctagcgagttgcgaagaattgcaagccaggtgaagtatgcaggctcacaagtggcgagcaccagcgaagttcttaaatataccctctttcaaatcttttctaagattgatcgtcctgaggctagccgaattaccctcttgttgatggcatcccaggagccgcagagaatgagtcgcaattttgtgcggtatgtgcagggattgaaaaagaagaaggtgattgtaatccctgtggggattggcccccacgcaaacctgaagcaaattcgtctcattgagaagcaggcccctgaaaataaggccttcgtgctgagtagcgtagacgagctggaacagcagcgagatgaaatcgttagctacctgtgtgacttagcacccgaggccccgccgccgaccctgccccctgacatggcacaggtgacagtggggcctgggcttttgggcgtcagtacgctggggcctaagcgcaacagtatggtactcgatgtggcgtttgtcttggagggctcggacaagattggagaggctgacttcaatcgcagcaaagagtttatggaagaagtcatccagaggatggatgtgggacaggacagcatccacgttacggtgctccagtatagctacatggtgacagtcgagtaccccttctctgaagcccagagcaaaggcgacatattgcaacgcgttcgggaaattcggtaccaaggtggaaatcgtactaacacaggacttgctttaagatacctctccgaccattcttttctagtatctcagggagatcgtgaacaggctccaaatctcgtctacatggtgaccggaaatcccgcatctgacgagatcaaacgtctccccggtgatatccaggtagttcccataggcgtggggcccaatgctaacgttcaggagttggagagaataggttggcccaatgcccccattctgattcaagacttcgagacattgcctagggaggctcccgacctggtactgcagagatgttgttcaggcgaagggctccagattccaaccctttctccggctccagattgctctcagcctctagatgtgattttacttttggacggttcatcttcgttccctgcctcctactttgatgaaatgaaatcctttgcaaaagccttcatctctaaggccaacattggtccccgcctcacccaggtgagcgtcctgcagtacggatctattaccactatcgacgttccatggaatgtggtgcctgaaaaggcacacctgctatctctcgttgatgtgatgcagagagaagggggtccctctcagattggcgatgcgctgggcttcgccgtccggtatctaacttcagagatgcacggagctcgccctggagcatcaaaggctgtggtgatactcgtgaccgacgtatccgtggatagtgtagatgccgccgccgacgctgctcggagtaaccgagtgaccgttttccctattgggatcggggatcggtacgacgccgctcagcttcgtatcctggctgggccagcaggggactccaacgttgtgaagctgcagcgcatcgaagaccttcctaccatggtgacactgggaaactcatttctacataagctatgtagcggatttgttagaatatgtatggacgaagatggaaatgagaaaaggccaggcgatgtgtggactttgccggaccagtgccataccgtgacttgtcagcctgatggccagaccctcctcaaatcccatagagtcaactgcgatcggggattgcggcctagctgccctaattcccagagtcccgttaaggtggaagagacctgtggctgccgctggacctgcccgtgcgtgtgcaccggctcttcaacgcgccatattgtgacattcgacggccagaattttaaactgaccggcagctgcagttacgtgctgttccaaaacaaggaacaggatctggaggtgatcctccacaatggcgcatgcagtccaggtgcacggcaagggtgcatgaaatccattgaggttaaacactcagcgctctcggttgaactgcactcagatatggaggtgacagtgaacgggcgcctggtgtcagtgccctatgtgggaggcaacatggaggtcaacgtgtatggtgcaataatgcatgaggttcggttcaatcacctaggacacatcttcaccttcacaccccagaacaacgagtttcaactacagttaagtcccaagacgtttgcctcaaaaacatacggattatgcggaatttgcgacgagaacggagccaacgattttatgctgagagatggcactgtgaccaccgactggaaaactctggtgcaagaatggactgtgcagcggccaggtcagacttgtcagccgattctggaagagcagtgtctcgtgcccgacagcagtcactgccaggtcctcctccttcccttattcgctgaatgccataaagtgctggctcccgctacattttacgccatctgccagcaggactcctgccaccaggagcaggtctgtgaggttattgcctcttacgcacacctgtgtcgcactaacggggtgtgcgtggattggcggacccctgacttttgtgctatgagttgtcccccttccctggtgtataatcactgtgagcatgggtgtccgcgccattgtgatggtaatgtgtcttcctgcggtgaccacccaagtgaagggtgcttttgcccccctgacaaagtgatgttggaggggagttgcgtgcccgaagaagcgtgcacccagtgtataggcgaggatggagtacagcaccagttcctggaagcctgggttcccgatcatcagccgtgtcagatttgcacgtgtttaagcggccgcaaagtgaattgcaccacccagccttgtccaacagcaaaggctcccacttgtggcctttgtgaagtggctcggttgaggcaaaatgccgatcagtgctgccctgaatatgagtgtgtttgcgatcccgtttcttgtgatctcccacccgttccgcattgtgagcgcggattgcagcctacgcttaccaatccaggtgagtgtcgccccaacttcacttgcgcttgtagaaaagaggagtgtaagcgcgtgtctccgcccagctgtccaccccaccgactccccactctcaggaagacccagtgctgtgacgagtatgagtgtgcatgcaactgtgtgaacagcaccgttagttgccctctgggctacctggcaagcacagctacgaatgactgcggctgtacgactaccacctgcttacctgataaagtgtgtgtacaccgtagtacaatatatcccgttggccaattctgggaggagggatgcgatgtgtgcacctgtacagacatggaggatgccgtaatggggcttagagtcgctcaatgttcacagaagccgtgcgaagactcctgcaggtctggcttcacatatgtcctccacgagggcgagtgctgcggacggtgcctgccatcagcatgtgaggtagtcaccgggtctcctaggggggattcccagagcagttggaagtctgtgggtagccaatgggcgagccccgagaatccgtgtctcatcaacgaatgcgtgcgtgtcaaggaggaagtgtttattcagcagcgaaatgtgtcatgcccccagctcgaagtccctgtttgccctagcggttttcagctctcatgtaagactagcgcttgctgcccatcatgccggtgtgagaggatggaagcatgcatgctgaatggcacggtcatcggacccgggaagaccgttatgattgacgtgtgcacaacttgtcggtgcatggtccaagtcggcgtaatcagtggcttcaaactcgagtgccgaaaaacgacatgcaacccttgccccctgggttacaaggaagaaaacaatacaggcgaatgctgtggccgctgtctacccactgcctgcactattcagctccgagggggtcaaatcatgacgctgaaaagagacgaaaccttgcaggacggctgcgatacacatttttgcaaggtgaatgagaggggcgaatacttctgggagaaacgcgttacgggatgcccaccttttgacgagcataaatgcttagcagagggcgggaagattatgaagatacccggcacctgttgcgatacctgtgaggaaccagaatgcaatgacattaccgcacgtctccaatacgtaaaggtgggctcctgtaaaagtgaagtagaagtagacatccactattgtcaaggcaagtgtgctagcaaagccatgtatagtatcgacatcaacgatgtacaggaccagtgcagttgttgttcccctacacgaaccgagcctatgcaagtggcactacactgcacaaatggatccgtggtgtatcatgaggtattgaacgcaatggagtgcaaatgtagccccagaaagtgttcaaaa

SEQ ID NO: 21298 - DNA, 8439 bp, synthetic construct
  misc_feature 1..8439: note = source = /note="Description of Artificial Sequence: Synthetic coding sequence"
  source 1..8439: mol_type = other DNA
atgatcccggcgcggttcgcgggagtgctgcttgctctcgccctcatcctgcccggaactctttgcgccgaaggtactcggggccgctcttcgactgcccggtgtagcctgtttggatcggattttgtgaatactttcgatggcagcatgtactcgttcgcgggctactgctcctacctgctggccggaggctgtcagaagaggtcgttcagcatcatcggtgacttccagaacggaaagcgcgtctcattgtccgtctacctgggcgaattctttgatatccacctcttcgtgaacggtaccgtgacccaaggagatcaacgcgtctccatgccttacgctagcaaagggctgtacctggagactgaggccggatactacaaacttagcggagaagcctatgggttcgtggctcgcatcgatggttctggtaacttccaagtgctcctgtccgaccgttatttcaacaagacgtgcggactctgcggcaactttaacatattcgccgaggatgatttcatgacccaagagggaaccctgacttcggatccttatgactttgccaactcgtgggcgctgtcgtcgggggagcaatggtgtgagcgcgcctcgcccccgtcgagctcctgcaacatcagctcaggagaaatgcagaagggcctctgggagcagtgccagctgttgaaatccacttccgtattcgcccgatgccacccgctggttgacccggagcctttcgtggccctctgcgagaaaaccttgtgcgagtgcgcgggcggacttgagtgcgcgtgcccagcgctgctggaatacgccaggacttgcgcgcaggaaggtatggtgctgtacggatggaccgaccacagcgcgtgctctccagtctgcccggcgggaatggaataccggcagtgcgttagcccttgcgcgcgtacgtgccagtcgctgcacatcaacgagatgtgtcaggaacggtgtgtggatggctgcagctgcccggagggacaactgctggacgagggactgtgcgtggaaagcactgagtgcccttgcgtccactcaggcaagagatacccgcccggaacctccctgtccagagactgcaatacttgcatctgtcggaattcgcagtggatctgcagcaacgaggaatgccccggagagtgcctcgtgactggacaatcccactttaagtcctttgacaatagatatttcactttttccggaatctgtcagtacctgctcgcacgcgactgtcaagaccattcattctcaatcgtgattgagacggtgcaatgcgcggacgatagggatgcggtgtgcacccgcagcgtgaccgtccggctgccgggacttcataacagccttgtgaagctcaagcatggggctggagtggcaatggacggtcaggatgttcagctgccgctgctcaagggagatctgaggattcagcataccgtgacggcgtcggtccggctgtcatacggagaggacctgcaaatggactgggatggtcggggtagactgctggtgaaactgtcccccgtctacgccggaaaaacctgcgggttgtgcgggaactacaatggtaaccaaggtgacgactttctgaccccttccggactggcggagcccagagtcgaagatttcggcaacgcatggaaactccacggagattgccaggatttgcagaagcaacacagcgatccttgcgcactcaacccacgcatgaccagattctcagaagaagcatgtgccgtgctgaccagccccacctttgaggcctgccaccgggccgtgagcccgctgccgtacttgcgcaactgccgctacgacgtttgctcatgctcagacggacgggaatgcctctgcggtgcgcttgcctcatacgccgccgcttgtgctggccggggagtgcgagtggcgtggcgggaaccaggtcgctgcgagctcaactgccctaagggacaagtgtacctgcagtgcggaaccccgtgtaacctcacttgcagatccctgtcgtatccggacgaagaatgcaatgaggcctgcctcgaaggatgcttctgcccaccagggctgtacatggatgaaaggggagattgcgtgccgaaagcgcagtgtccgtgctactacgacggagaaatcttccagcccgaggacatcttctcagatcaccataccatgtgttactgtgaagatggtttcatgcactgtaccatgagcggcgtccccggatcgctgctgccggacgcggtgctctcctcgcctctgtcgcatcgcagcaagcggtcgctttcgtgccgcccgcccatggtgaagctggtctgtcctgcagataacctgcgtgccgaggggctcgagtgtaccaaaacctgccagaactatgacctggagtgtatgtctatggggtgcgtctcaggctgcctgtgcccgccggggatggtcaggcacgagaacaggtgcgtcgcccttgaacgctgcccctgcttccatcagggcaaagagtacgcgccgggcgagactgtcaagattggatgcaatacgtgcgtgtgccaggataggaagtggaactgtacggatcacgtctgcgatgccacctgctcaactatcggaatggctcactacctcaccttcgacggactcaagtacctgttcccgggtgaatgccaatacgtgctcgtgcaggattactgcggatctaatccaggaacgttccgcatcctggtgggaaacaagggctgttcccacccgagcgtcaagtgcaagaagagagtgactatccttgtggaaggcggagagatcgagttgttcgacggtgaagttaacgtgaagcggccaatgaaagatgaaacccatttcgaggtcgtggagagcggacgctacatcattttgctcctcggcaaggcactgtccgtggtgtgggaccggcacctgagcatctccgtagtcctcaagcagacctaccaagaaaaagtctgtggactgtgcggaaacttcgacggaatccagaataacgaccttaccagctcgaaccttcaagtcgaagaggatcctgtggacttcggcaactcatggaaagtcagttcacagtgcgcagatactcggaaggtgcccctcgattccagccctgctacctgccacaacaacatcatgaaacaaactatggtggactcatcctgccgcattctgacttctgacgttttccaggactgcaacaagctggtggaccccgaaccgtacctggacgtgtgcatctacgacacctgcagctgcgaatccatcggagattgcgcgtgcttctgcgataccatcgctgcatacgcgcacgtgtgtgcgcaacacggcaaagtggtgacctggagaactgcgactctttgcccgcagtcatgcgaagaacggaacctgcgcgagaacggatacgaatgcgaatggcggtacaattcctgcgccccagcttgccaagtgacctgccagcacccggaacctctggcctgcccagtccaatgtgtcgaagggtgccatgcgcactgtccacctggaaagatcctggacgagctgctgcagacgtgcgtcgaccctgaagattgtccggtctgcgaagtcgctggccgcaggtttgcgtcgggcaagaaagttactttgaatcctagcgacccggaacactgtcagatctgtcactgcgacgtggtgaatctcacctgcgaagcctgccaagagcccggtggactcgtcgtccctccgactgacgcgccggtcagcccgactaccttgtacgtcgaggacatctcggaacctccactgcacgacttctactgctcgagactcctggatttggtctttctgctggatggctcctcccgcctgtccgaagcggaattcgaagtgttgaaggccttcgtcgtggacatgatggagcggctgagaatcagccaaaagtgggtgcgcgtggcagtcgtggagtaccacgatggatcacatgcgtacatcggactgaaagaccggaaacggccgtcagaactgcgcagaattgcttcccaggtgaagtacgccggatcgcaagtggcttccacctcggaggtgctcaagtacactctctttcaaatcttctccaagatcgatcggccggaagcctcccggatcaccctcctgctgatggcgtcacaggaaccccaacggatgtcgcggaacttcgtgcggtatgtccagggactcaaaaagaagaaggtgattgtgatccctgtgggcatcggcccgcacgccaacttgaagcagatcagactgatcgaaaaacaggcaccggaaaacaaagcatttgtgctgtcatcagttgacgaattggaacaacaacgggatgaaatcgtgagctacttgtgcgacttggctcctgaggctcctccaccaaccctcccaccagacatggcacaggtgactgtgggccccggcttgctcggggtgagcaccctgggacccaaaagaaactcgatggtgctggatgtggcattcgtcctggaaggaagcgacaaaatcggagaagcggacttcaatcggtcaaaagaattcatggaagaagtgatccagaggatggatgttggacaggattcgatccacgtgactgttctccagtactcctacatggtgaccgtcgaataccctttctcggaagcgcagtcaaagggagatatcctccagcgcgtgcgtgagatccggtaccaaggaggaaaccggaccaataccggcctcgccttgcgatacctgtctgaccactcctttctggtatcgcagggagacagggaacaagccccgaatcttgtgtacatggtgactggcaaccctgcatcggacgagatcaagcgccttccgggggatattcaggtcgtgccgattggagtgggcccaaacgccaatgtgcaggagctggaacggattggttggcccaacgcaccgattctgattcaagactttgagactctgccgcgcgaagcaccggatctggtcctgcagcgctgctgttcgggtgagggactgcagatccccacgctgtcgccggcaccggactgctcccagcctttggatgtgatcctcctgcttgatggatcgtcgagcttccctgcgtcgtactttgacgaaatgaagtcattcgccaaggctttcatatcgaaggcgaatatcggcccccgcctgacccaagtgtctgtgctccagtatgggtcgatcaccactatcgacgtgccgtggaatgtggtcccggaaaaggcccacttgctgagcttggtcgatgtcatgcaaagggaaggcggcccatcccagatcggagacgccctgggctttgctgtgcgctacctgacttcagaaatgcatggagctcgcccgggagcctccaaggcggtcgtgatcctggtcaccgatgtgagcgtggactcggtggatgccgccgcggacgccgcccgctccaaccgcgtcaccgtgttccccatcggcatcggcgaccgctacgacgctgcgcaactcagaatcctggcgggaccggctggagacagcaacgtcgtgaagctgcagcggattgaggacctccctactatggtgacgctgggaaacagcttcctccataagttgtgttccggcttcgttcggatctgcatggatgaggatggcaacgagaagcgcccgggcgacgtctggacgctgcccgaccagtgccatacggtcacctgccaaccggacgggcagacccttctgaaatcacatcgcgtcaattgtgaccggggactgcggccgagctgccctaactcccaatcacccgtgaaggtggaagaaacttgtggctgcaggtggacttgcccgtgcgtctgcactggctcaagcacgcggcacatcgtgaccttcgacggccaaaacttcaaattgaccggctcgtgcagctacgtgctgtttcagaataaggaacaggacctcgaggtgatcttgcataacggggcgtgttcacctggagctcggcaggggtgcatgaagtcaattgaagtgaagcatagcgcactgtcagtggaactgcattccgatatggaagtgactgtgaacggtagactcgtgtcggtgccgtacgtgggaggcaacatggaagtcaacgtgtacggcgccatcatgcatgaagtgagattcaaccacctcggccatatcttcacgtttacgccgcagaataacgaattccagctgcagctttcccctaagactttcgcaagcaagacctacggactctgtggaatttgcgacgaaaatggtgcgaacgactttatgctccgcgatggaactgtaaccaccgactggaaaactctggtgcaggaatggactgtgcagcggccaggacagacttgccagccaatactcgaagaacagtgcctggtaccggacagctcccattgccaggtgctgctccttccgctgttcgccgagtgccacaaagtcctcgcaccggccactttctacgccatctgccaacaagattcctgtcaccaggagcaggtgtgcgaagtcatcgcatcatacgcgcatctgtgccgcactaacggggtgtgcgtggattggcggactccagacttctgcgctatgtcgtgcccgccgtcactggtgtacaaccactgcgagcatggctgcccgaggcactgcgatggaaacgtcagctcgtgcggggaccacccgtccgagggttgcttttgccctccggataaagtgatgcttgaggggtcctgtgtgccagaagaagcgtgcacccagtgtatcggcgaagatggagtccagcaccagttccttgaagcctgggtcccggaccatcaaccgtgccagatttgcacctgcctctccggtcgcaaggtcaattgcaccactcaaccatgtccaaccgcgaaagcccctacctgtggactctgtgaggtggcacgcctccgacaaaacgccgatcaatgctgccctgaatacgagtgcgtctgcgatcctgtctcctgtgatttgcctccggtgccacactgcgagcgcggactgcagccgactctgaccaatccgggggagtgcagaccgaactttacttgcgcttgccgcaaggaagaatgtaagcgggtgtcgcccccatcctgcccgccacacagactgccgactctgcgaaagactcaatgctgcgacgaatacgagtgtgcgtgtaactgcgtgaactctaccgtgtcatgccccctcggatatctggcctccaccgccaccaatgactgcggatgcaccaccacgacgtgcctcccggacaaagtgtgtgtccaccggtccaccatctatccggttgggcaattctgggaggagggttgcgacgtgtgcacttgcaccgacatggaggacgctgtgatggggctgagggtggcgcaatgttcgcaaaaaccgtgcgaagattcctgccgctccggcttcacctacgtcctgcacgaaggcgaatgctgtgggcgctgcctgccatcggcctgcgaggtggtgactggttcgccaagaggcgactcccagtcgtcctggaaatcagtgggaagccagtgggcgtcgcccgaaaacccgtgcctgatcaacgagtgcgtgcgggtgaaggaagaagtgttcatccaacagaggaatgtctcgtgcccgcagcttgaagtgcctgtgtgcccgtcgggattccaactctcatgcaagacttccgcttgctgcccgtcctgtagatgcgagagaatggaagcctgcatgctgaacggaactgtcatcggtccgggtaagactgtgatgatcgacgtgtgtaccacgtgtcgctgcatggtgcaggtgggagtgatctccggcttcaaacttgaatgccggaaaactacgtgtaacccttgccctctcggctacaaggaggagaataacactggagagtgctgcggtcggtgcctgccaaccgcctgcactatccagctgcgcggtggacaaatcatgacccttaagcgggatgaaactctgcaggacgggtgcgacactcacttctgcaaggtgaacgagcggggggagtatttctgggaaaaacgggtgactgggtgcccgccttttgacgaacacaagtgcctggccgagggcggcaagatcatgaagatcccagggacttgctgcgacacttgcgaggaaccggagtgtaacgatatcaccgcacggctgcaatacgtgaaggtgggctcgtgcaagtcagaagtggaggtggacatccactactgtcaaggaaaatgtgctagtaaggcgatgtactcaatcgacatcaacgatgttcaagatcaatgttcgtgctgctccccaacccgcaccgagccaatgcaggtggctctccattgcactaatgggtctgtcgtctaccacgaggtgctgaatgctatggaatgtaaatgtagcccaagaaaatgctccaag

SEQ ID NO: 21299 - DNA, 8439 bp, synthetic construct
  misc_feature 1..8439: note = source = /note="Description of Artificial Sequence: Synthetic coding sequence"
  source 1..8439: mol_type = other DNA
atgatcccagctcggttcgcaggtgtactgctggctctggccctgatcctgccaggtaccctttgcgccgaaggaacccggggaagaagctccaccgcacgatgttctctctttggaagcgacttcgtgaacaccttcgatgggtccatgtactcatttgcaggctattgcagctaccttttggccggaggatgccaaaagcgctcgttctcaatcatcggagacttccagaatgggaaacgcgtgagtctgtcggtttaccttggggagtttttcgacattcacttgttcgtgaatggaactgtgactcagggtgaccaacgggtgtctatgccttacgccagtaaagggctttacctcgaaactgaggccggatactacaagctctcgggtgaagcctacggtttcgtagctaggattgacggatcgggcaactttcaagtgttgctttccgatcgctatttcaacaagacctgcggattgtgtggaaacttcaacatattcgcagaagatgacttcatgactcaagaaggaactcttacctcggacccgtacgacttcgcgaattcatgggccctgtcgtccggagaacaatggtgcgagagagcgtccccaccgagctccagctgcaacatctcctcgggggagatgcagaagggactgtgggaacaatgccagctgctgaagtccacctccgtgttcgcacgatgccacccgctggtggaccctgaaccgtttgtcgcactttgtgaaaagacgctctgcgagtgcgccggaggcctggaatgtgcgtgccccgccctgctcgaatacgcgcggacctgcgcccaggagggtatggtcctctatggctggactgaccattcggcctgttccccagtttgcccggcagggatggagtacagacaatgtgtgtccccgtgcgcccggacgtgccagtcactgcatatcaatgagatgtgccaggaacgctgcgtcgatggctgctcgtgccctgaaggacagctgctggatgagggactttgcgtggaatccaccgagtgtccatgcgtgcactcaggaaagcggtacccgcccggaacctcgctctccagagactgtaacacctgcatctgcagaaactctcagtggatctgcagcaacgaagagtgccctggcgagtgtctggtgaccggacaatcccacttcaaatcctttgacaatagatactttaccttctcgggcatttgtcagtacctgctggctcgggactgtcaggaccactcattcagcatcgtgatcgaaaccgtccagtgcgcggacgatagagatgccgtctgcaccagatcggtgacggtgcgcctcccaggcctccataatagcctggtcaagctgaaacatggcgcgggagtggcaatggacggtcaggacgtgcaactgccgctcctgaaaggagatctgaggatccagcataccgtcaccgcctcagtgcgactgtcatacggagaggacctccagatggattgggacggccgcgggcgcctgctcgtcaaactctcccccgtttacgcgggaaagacttgtggtctgtgtggtaactacaatggcaaccagggagatgattttctgaccccgtcgggcctggccgagccgcgggtggaagatttcggaaacgcgtggaagctccacggtgactgccaagacctgcaaaagcagcactccgacccgtgcgccctcaacccgcgcatgactagattctcagaagaagcgtgcgcggtgcttacttcgccgaccttcgaagcctgtcatcgcgcggtttcgccactgccgtacctgcgaaattgccgctatgacgtttgcagttgctcggacgggcgcgagtgcctgtgcggagccctcgcttcctacgccgcagcatgcgccggaagaggagtcagagtggcttggagagagccgggccggtgcgagttgaactgccctaaaggccaggtgtacctgcagtgtggaacgccgtgcaacttgacgtgcaggtccctgtcgtacccggacgaagaatgcaatgaggcatgtctggaaggatgcttctgcccccctggactctacatggatgaacggggcgactgcgtgcccaaagcccaatgtccgtgctattacgatggagagatcttccaaccagaggatatcttcagtgatcaccataccatgtgctactgcgaggacggattcatgcactgtaccatgtcgggagtgcccggctcactcctgccggatgcggtgctgagctcaccgcttagccatcggtcaaaaaggtcgttgtcgtgccggcctcctatggtgaaactcgtctgcccggctgacaacctcagagcggaagggctggaatgcacgaaaacttgccaaaactacgacctcgagtgcatgagcatgggatgcgttagcggatgtctgtgtccgccaggaatggtgcgccacgaaaaccggtgtgtggcccttgaaaggtgcccatgcttccaccagggaaaggagtacgcgccgggagaaactgtcaagatcgggtgcaatacttgcgtctgccaggaccggaagtggaattgtactgatcacgtctgcgacgcaacttgctcaaccatcggaatggcgcactacttgaccttcgacggattgaaatacctgtttccgggcgagtgtcaatacgtgctggtgcaagactactgcggatccaacccgggaaccttccgaattctggtgggaaacaaaggatgctcacacccaagcgtgaagtgcaagaagagagtgaccatcttggtggagggcggagagatagaactgtttgacggggaagtgaatgtgaagcgcccaatgaaggacgaaactcattttgaagtcgtcgagagcggacgctacatcatcctgctcctggggaaggccctgtcggtggtttgggacagacacctgtcaatctcggtggtcctcaagcaaacctaccaggaaaaggtgtgcggcctttgcggaaactttgatggaatccaaaacaacgacctgacttcttcgaacctgcaggtggaggaggacccagtcgacttcggcaacagttggaaggtgagcagccaatgtgccgacacccgcaaagtgccgctggatagctccccggcaacctgccacaacaatatcatgaagcagactatggtagactcgtcctgccgtatccttacttcggatgtgttccaggactgcaacaaacttgttgaccctgaaccttacctggatgtgtgcatctacgacacctgttcatgcgagtcaatcggagattgcgcctgcttttgcgacaccatcgcggcttacgcccacgtatgcgcgcagcacgggaaggtggtcacttggcggaccgccacgctgtgcccccagtcctgcgaggagcgcaacctccgagaaaacggctacgaatgcgagtggcggtacaattcctgcgcaccggcttgccaggtcacctgccagcacccggagccgctggcctgtccggtgcagtgtgtcgaagggtgtcatgcgcactgcccgccaggaaaaatccttgacgaattgctgcaaacttgcgtcgaccctgaggactgtccggtgtgcgaagttgcggggcgccgctttgcgtcgggcaagaaggtcactctcaacccgtcggacccagagcattgtcaaatctgccactgcgatgtggtcaacctgacttgcgaagcctgccaagaacctgggggactggtggtgccaccgacggatgctcccgtgtcaccgacgactctctacgttgaggatatcagcgaacctccactgcatgatttctactgttcccggctcctcgatcttgtgtttctgctggacggaagctccaggctctccgaggccgagtttgaagtgctgaaagcattcgtggtggacatgatggagagactgcgcatcagccagaagtgggtccgcgtggcggtggtcgagtatcacgatggatcacacgcttacattggcctgaaggaccggaagcggccgtcagagttgcgccggattgcatcgcaggttaagtacgctggctcccaagtggcatcgactagcgaagtgctcaaatacactctgttccagatattctccaagatcgacagaccagaggcgagcagaatcaccctgctcctcatggcatcgcaagagccgcagaggatgtcccgcaactttgtccggtacgtgcaggggcttaagaagaagaaggtgattgtgatcccggttggtatcggcccccatgccaatctgaagcagattaggttgatcgagaagcaggcgccagaaaacaaagcgttcgtgctctcgtcggtggatgaacttgaacagcagcgcgacgagattgtctcgtacctgtgcgatctggcacctgaggctccaccgcctaccctgcctccggacatggcacaggtgacggtcggccctgggctgcttggtgtgtcgactctgggaccaaagagaaattccatggtccttgatgtcgcgttcgtactggaggggagcgacaagatcggagaagccgatttcaaccgaagcaaggaattcatggaggaagtgatccagcgcatggacgtcggccaggactccatccacgtgactgtcctccagtacagctacatggtgacggtggagtacccgttctctgaagcgcagtcgaagggtgatatcctccaaagagtccgggaaattcggtaccaaggaggaaaccggactaacaccgggctggccctgagatacctgtcagaccactcctttttggtttcccagggtgaccgcgaacaggcccccaatctggtgtacatggtgactggaaatccagcttcagatgaaatcaagcgactgcccggcgacatacaggtggtgcctatcggagtgggaccgaacgcgaacgtccaagaactggaaaggatcggttggccgaacgctccaatccttatccaggacttcgagactctgccgcgcgaagcaccagatcttgtcctgcagcgctgttgtagcggcgagggcctccaaattccgaccctgtcgccggcgcccgactgtagtcaaccactcgatgtgatcctcctgttggatggctcatcatccttcccggcctcctacttcgatgagatgaaatcgtttgccaaggccttcatctccaaggccaacatcggaccaaggctgacccaggtgtcggtcttgcaatacggttccatcactacgatagatgtcccctggaacgtggtgccagagaaggcccacctcctgtcgctcgtcgacgtgatgcaacgcgagggaggcccgtcgcaaatcggggacgccttgggattcgcagtgcgctatctgacttcggaaatgcacggagctaggccgggcgcctcaaaggctgtggtcatcctcgtgactgatgtctcggtggacagtgtggatgctgctgcggatgctgcgcggagtaatcgcgtgactgtgttcccaatcggaatcggtgaccgctacgatgcagcccaactcaggatcttggccggaccagccggagattcgaacgtcgtgaagctgcagaggatcgaagatctcccgactatggtgaccttgggtaacagcttcctgcacaaactgtgctcggggttcgtgcgcatctgcatggacgaagatgggaatgagaaaagaccgggagatgtctggaccctgcccgaccagtgtcatactgtgacttgtcaaccggacggccagactctgctgaaatctcatcgggtcaattgcgaccgcggactgcggccctcgtgtccaaactcccaatcgccggttaaggtggaggagacgtgcggatgccggtggacttgcccatgcgtgtgcaccggaagctccaccaggcatatcgtgactttcgacggacagaatttcaaactcaccggatcctgcagctacgtgctgttccagaataaagaacaggacctggaagtcattctgcacaatggagcgtgtagcccgggcgcgcgccaaggctgtatgaagtccatcgaggtgaagcactcagcactctcggtggaactgcatagcgatatggaggtgactgtgaatggtagactggtcagcgtgccctatgtaggaggtaatatggaagtgaacgtgtacggcgctatcatgcacgaagtccgctttaatcatctcggacacatcttcacttttacgcctcagaacaatgagttccaattgcagctgtcccctaagacgtttgcttcaaagacctatggcctctgcggaatctgcgacgagaatggagccaacgatttcatgctgcgtgacggcactgtcacgaccgactggaaaactctggtgcaggagtggaccgtgcagcggccgggacagacgtgtcaaccgatcctcgaagagcagtgtctggtgcctgactcaagccactgtcaggtgttgcttcttcctctcttcgcagaatgccacaaagtcctggccccggcgaccttctacgcaatctgccaacaagattcgtgtcatcaggaacaggtatgcgaggtcatcgcctcatacgcccatctgtgtagaaccaacggggtctgcgttgactggcgcacccctgacttttgcgcaatgtcatgtccaccctcgctggtgtacaaccactgcgaacatggatgcccgcgccattgcgacggaaacgtgtctagctgcggcgatcacccgtccgaaggttgcttctgcccgcccgacaaagttatgttggaaggaagctgcgtgccggaggaggcttgcacccagtgcattggcgaggacggagtgcaacatcaattcctcgaagcctgggtgcctgatcaccagccatgccaaatttgcacttgcttgtcgggacgcaaggtcaactgcactactcaaccttgccccaccgcaaaggcgcccacttgcggactctgcgaagtggccaggctgcggcagaacgcagaccaatgctgcccggaatacgaatgcgtctgtgacccagtctcgtgtgacctcccaccggtcccgcactgcgaacggggactgcagccgaccctgaccaatccaggggaatgccgcccgaacttcacttgcgcctgcagaaaggaggagtgcaaaagagtgtccccaccgtcctgcccgcctcaccggctgccgacgctccggaaaactcagtgttgcgacgaatacgaatgtgcctgtaattgcgtgaactcgactgtgtcttgtcctctgggatacctcgcctctactgctaccaatgattgtggatgcaccaccaccacttgcctcccagataaagtctgcgtgcaccggtcaaccatctacccagtgggccaattctgggaagaagggtgtgacgtctgcacgtgcaccgacatggaggacgccgtgatgggactcagggtcgctcagtgttcacagaagccatgcgaagattcctgcaggtcaggttttacgtacgtgctccatgaaggggagtgctgcggccgctgtttgccgagcgcctgcgaagtcgtgactggatcaccgagaggtgattcgcagagctcctggaagagtgtgggctcccaatgggcctcccctgaaaacccatgtctgatcaacgaatgtgtgcgcgtgaaggaggaggtgttcattcagcagcgcaacgtgagctgccctcagctcgaggtgcctgtctgtcctagcggattccagctgtcgtgcaagacctccgcttgctgtccctcatgtcggtgcgaacgcatggaagcgtgtatgctgaatgggaccgtcatcgggccaggcaagaccgtgatgatcgacgtctgcaccacctgccgctgcatggtgcaagtgggcgtgatctcgggattcaagctcgaatgcagaaagactacctgcaatccgtgccctttgggttataaggaagagaacaacactggcgaatgctgcggtcggtgtctgcctactgcttgcaccatccagctgcggggaggccagattatgactctcaagcgggatgaaaccctgcaggacggctgcgatacccacttctgcaaggtcaacgagcgcggggagtacttctgggagaagcgggtgaccggatgtccaccgtttgacgaacacaagtgcctcgccgaggggggaaagatcatgaagattcctgggacctgctgcgatacttgcgaagaacctgaatgtaacgatatcactgcccggctccagtacgtgaaagtggggtcctgcaagagtgaagtagaggttgacatccattactgccaggggaagtgcgcgagcaaagcaatgtacagcatcgacatcaatgatgtccaagatcagtgcagctgctgcagccccactaggaccgagccgatgcaggttgccctgcattgtaccaacggatccgtggtgtaccatgaagtccttaatgctatggagtgcaagtgttctccacgaaagtgctcaaag

SEQ ID NO: 21300 - DNA, 8439 bp, synthetic construct
  misc_feature 1..8439: note = source = /note="Description of Artificial Sequence: Synthetic coding sequence"
  source 1..8439: mol_type = other DNA
atgatacctgcaagattcgcaggcgtgctgctggctctggccctgatcttgccgggaacactatgtgcggaaggtaccaggggccgttcctccaccgcacgttgctccctgttcggatctgactttgtaaatactttcgacggatctatgtattccttcgccggttactgttcttacctgcttgcaggagggtgccagaagcgtagcttctcgattattggagatttccagaacggtaagagggtaagcctctccgtttatctgggggagttcttcgatatccacctgtttgtcaacggtacagtaacacagggggatcagcgagtgtccatgccgtacgcaagcaagggactgtacttggagactgaggctggctattacaagttgagtggggaagcatacggatttgtggcccgaattgacggcagcggcaattttcaggtgttgctctctgatcggtacttcaacaaaacctgtggattgtgtgggaactttaacatcttcgccgaggacgatttcatgacccaagaaggcacactgacttcagacccttacgacttcgcaaactcctgggccctctcatcgggagaacagtggtgtgaacgggcctcacctcccagttcatcctgcaatatctcctctggggaaatgcagaaaggactctgggaacagtgtcagctgctgaaaagcacaagcgtcttcgccagatgccaccctctggtcgatccagaacctttcgtggccctgtgcgagaaaacactttgcgagtgcgcggggggcctggagtgtgcctgccctgctcttcttgaatacgcacgcacatgtgctcaggagggaatggttctgtatggctggacagaccattccgcctgctctccggtctgtcccgccgggatggagtatcgccagtgcgtgagcccgtgtgcacgcacttgccaatctctacacatcaatgagatgtgccaggagagatgcgttgatggttgcagctgccctgaggggcaacttttagatgaagggctgtgcgtggaatcgacggagtgcccctgcgttcatagcgggaaacgctatccccctggtaccagcttgagccgcgactgcaacacatgtatttgccggaattcacaatggatctgcagcaatgaggagtgcccaggcgagtgcctggtgacagggcagagtcacttcaagagcttcgataatcgatactttacatttagtggcatctgtcagtacttgctcgctcgagattgccaggatcactcattcagcatagtcatcgagaccgttcagtgtgcagatgatcgggacgctgtttgcacacggtctgttacggttcgactgcccggtttgcataacagccttgtgaaactgaagcacggagcaggcgtcgccatggacggccaagatgtgcagttgcctctgcttaagggagacttacggatccaacacactgtcacagccagcgtccggctaagttacggcgaggatttacaaatggactgggatgggcgcggtcggctactagtgaagcttagccccgtgtatgctggtaaaacatgcggtttatgtggtaattacaatggcaaccagggtgatgattttctcacgccatcagggctcgcggagccaagggtggaggactttgggaacgcatggaaacttcatggggattgtcaggatttacagaagcagcattccgacccgtgtgcattgaatccgcgcatgacccgcttctcagaggaggcctgtgctgtgctaaccagtcctacctttgaggcatgccacagggcggtctcaccgctgccttacctgcggaactgtagatacgatgtgtgtagttgttcagacggccgggaatgcctatgcggagcgctagcatcgtacgccgcggcttgcgctggacggggggtgagggtggcctggcgcgagcccggccgatgtgagcttaattgccctaaggggcaagtttacttacagtgcggtacgccttgcaacctcacgtgtaggagcctgagctaccccgacgaggagtgtaatgaagcctgcttggagggatgcttctgcccccccgggctttacatggacgagcggggcgattgcgtgcccaaggcgcaatgtccctgctattacgacggagagatattccagccagaagacatcttcagtgaccaccacacaatgtgctattgcgaggacggcttcatgcactgcaccatgagtggtgtacctggaagcctcctgcctgatgccgtgctctcatcccctctttcacacaggagcaaaaggtccctgagctgccgcccacccatggttaagctagtgtgccctgcggacaatttacgcgccgagggcttagagtgtaccaagacctgccagaactatgatctcgagtgtatgagcatgggatgcgtgtccgggtgcctttgtccaccgggcatggtgcgccacgagaatcggtgcgtggctctggagcgatgcccatgtttccatcaggggaaggagtacgcccccggggaaactgtcaagattggatgcaacacctgcgtgtgtcaggaccgcaagtggaattgtacagaccatgtgtgtgacgccacatgctctacaatcggcatggctcactacttgacattcgacggcctgaaatatctgttccccggagagtgtcagtacgtgttggtccaggattactgcggctccaaccctggcacctttagaatattggtaggaaataagggctgctctcatcccagcgttaaatgcaaaaaacgcgtgacgattttggtggaaggaggggaaattgagctgttcgacggtgaggtcaatgtcaaaaggccaatgaaagacgagactcactttgaagtcgtggaatccggccgctacatcattctattgctcggaaaggctctctccgtcgtctgggacaggcacctatctatctccgttgtcttgaagcagacctaccaggaaaaggtgtgcggactctgcggtaacttcgacggcatccagaacaatgaccttacctcgtctaacctccaggttgaggaggatcccgttgactttggtaatagctggaaagtgagtagtcaatgcgctgacaccagaaaagtgcctttggattcttctccagctacgtgccataataatattatgaaacaaacaatggtggactcaagttgtcgaattctcaccagtgatgtgtttcaggattgtaacaagcttgtggaccctgagccatatctcgacgtctgtatatacgacacctgctcttgcgaatctatcggagattgcgcctgtttctgtgacaccattgctgcttacgcacacgtctgtgcccaacacggtaaggtcgtgacatggcggaccgccacactgtgcccccagtcttgtgaggagcgtaaccttagagagaacggctatgagtgtgagtggcgctacaacagttgcgcccctgcctgccaagtgacctgccaacatcctgagcctctggcctgtccagttcagtgcgtggaagggtgccacgcccattgccctccagggaagatactcgatgagctattgcagacctgtgtcgatcctgaggactgccccgtctgtgaagtagctggcagaaggttcgcgtcaggcaaaaaggtgactctgaacccgagtgaccctgagcactgtcagatttgccactgcgacgtggttaacctcacatgtgaagcatgccaggaaccaggcggcttggtggtcccccctactgacgctcctgtttctccaaccaccctgtacgtggaagacattagtgagccccccctgcacgacttttattgcagccggctgctggatcttgtgttcctgctggacggctcctcccggctgtccgaggccgagttcgaggtgttgaaggccttcgttgttgacatgatggagcggctgaggatctctcagaagtgggttcgcgtggcagtggtcgagtaccatgatggctctcatgcctacattgggctaaaagatcgcaaacgccccagcgagctgcggcggattgcctctcaggtgaaatacgctgggtctcaggttgcctccacgagcgaagtgctgaagtatactctgttccagatcttctctaagattgacaggcccgaggcatccaggattacgctgctgctgatggcgtcccaggaaccccaacggatgagtcggaatttcgtcagatatgtgcagggcctcaaaaaaaagaaagttatcgttattccagtcggaattggtcctcacgcaaatctgaagcagatccgccttattgaaaagcaagccccagagaacaaggcgtttgttctctctagtgttgatgagctggagcagcaaagggacgaaatcgtcagttacctgtgcgatttggcccctgaagcgccaccacccacactgcctcccgatatggcacaagtcaccgttggcccagggttactcggggtgtctactctcgggcccaaacgtaattcaatggtgctcgacgtggccttcgttttggaaggctccgataagattggcgaggctgactttaataggagcaaagagtttatggaggaagttatccagagaatggacgtggggcaagacagcattcatgtgacagtactccaatactcttacatggtcacagttgagtatccattttctgaggcccagtcgaaaggcgatatccttcagcgagttagggaaatccgctatcagggaggtaatcgcactaacaccggtctggccctgcgctatctgtcagaccactcattcctggtaagtcaaggagacagagagcaggcaccaaaccttgtgtacatggtcaccgggaatcccgcgtcagatgagatcaaaaggctgcccggagacatacaggtggtgccaataggtgtcggtccgaatgccaatgtgcaggagcttgagcgcataggttggcccaacgcaccaatccttattcaagactttgagacactcccccgggaggcacctgacctggttctgcagaggtgctgttccggtgagggtctccaaattcctacgctgtcacccgcacccgattgcagccaacctctggatgtgattctcctcctggacgggagttctagcttccctgcttcctacttcgatgagatgaagtctttcgctaaggcgttcatttcgaaggcgaatatcgggccgcggctgactcaagtgtctgtgctgcagtacggatccataaccacgattgacgtgccctggaacgtggttcctgagaaagcccaccttctctctttagtcgacgtcatgcagcgggaaggtggaccctcccagatcggcgacgctttgggctttgctgtccggtacctgacttccgaaatgcacggggctcgcccaggggcatccaaagctgtggttattctggtgacagatgtcagcgttgactcagtagacgccgcagccgatgcagccagaagcaaccgtgtcaccgtgttccctatcggcatcggagatcgctacgacgcagcgcaattgcgaatcttagcgggaccagcaggcgattccaacgttgttaagctccagaggattgaggacctccccactatggtgaccttgggcaacagcttcctgcacaagttgtgcagtggcttcgtccggatatgcatggatgaggacggcaacgagaaacgtccgggcgatgtatggaccctccctgaccaatgccacacggtcacctgtcaacctgacggccagacgctactgaagtcccatagagttaactgtgatcggggacttcggccctcatgtcctaatagccagtcccccgtgaaggtcgaagagacttgcggatgtcgctggacttgcccttgtgtgtgtactgggagcagcacccggcatattgtgaccttcgacggacagaatttcaagctgacgggcagctgttcatatgtcttgttccagaacaaagaacaggatttggaggtgatcctccacaacggggcctgcagcccaggcgcacggcaggggtgcatgaaatctatagaggtgaagcactctgcgctgtcagtggaactccattctgacatggaagttactgtaaacggccgactggtgtctgtcccttacgtgggaggaaatatggaggtgaatgtctacggggccatcatgcacgaggtccggttcaaccacctggggcacatctttacattcaccccacagaacaatgaattccagctgcagctgtcgcccaaaacctttgctagtaagacttatggactctgcggcatttgcgatgaaaatggggctaacgacttcatgcttcgcgatggtacggtgacaacagactggaagacgctcgtccaagagtggaccgttcagagacctggccagacttgtcagcctattctcgaagagcagtgcctagttccagattcatcacactgtcaagtgctgttgttgcctctgtttgcggaatgtcataaggtactggcaccagctaccttctacgccatctgccagcaggacagctgccaccaggaacaagtctgcgaggttatagctagctatgcccatctgtgcagaacgaatggcgtatgtgtggattggcgaacaccagatttctgtgcaatgagttgccccccaagcctcgtgtataatcattgtgagcacggatgtccgcgacactgcgatgggaatgtcagttcttgtggcgatcaccccagcgaagggtgcttttgccccccagataaagtgatgctcgagggcagctgcgtgcctgaggaggcatgcacccagtgtatcggagaggacggcgtacagcatcagttcttagaggcatgggtcccagaccaccagccatgtcagatctgcacctgtcttagtggacgtaaggtaaactgcaccactcaaccctgccccaccgccaaagcgccaacgtgcggcctgtgcgaggtggctagactccgacagaacgctgaccagtgttgtcccgagtacgagtgcgtctgtgacccagtctcctgcgatcttccccccgtaccccactgcgagaggggcttgcagcccaccctgacaaaccctggagagtgccgccccaactttacctgcgcttgtaggaaggaggaatgcaaaagagtgagtcccccttcctgtccaccacacagactacccaccttacgaaagactcagtgttgtgatgaatatgagtgtgcctgcaattgtgtgaactctacagtgtcatgtcccctagggtatctggctagtacggccactaatgattgcgggtgtactacgacaacctgcctccccgacaaggtctgcgtgcatcgctccaccatctacccggtgggacagttttgggaggaaggatgcgacgtgtgtacctgtaccgatatggaggacgccgtcatggggctcagggtggcccagtgcagccagaagccgtgcgaggactcctgtaggagcgggttcacttacgtgcttcatgagggagagtgctgcgggaggtgcctgccgagcgcatgcgaagtcgttaccggaagtccacgaggcgatagccagagttcatggaagtcggtgggctctcagtgggcaagccccgaaaacccttgtctgattaatgagtgcgtgagagtaaaagaggaagttttcatccaacagagaaatgtgtcatgtccccaactcgaagttcccgtgtgtccaagcggcttccagctgtcttgcaaaacatcagcatgctgcccatcgtgcaggtgtgagcggatggaagcatgcatgctgaatgggactgttatcgggccgggaaaaactgtgatgattgacgtctgtaccacttgcagatgcatggttcaagtcggcgtcatttctggctttaagttggagtgtcggaaaaccacctgtaatccatgcccacttggctacaaggaggaaaacaacacaggggaatgttgcggacggtgccttcctaccgcctgcactattcagctgcgcggagggcagatcatgaccctgaaacgagatgaaacgctgcaggatgggtgtgacacgcacttctgtaaggtgaatgagaggggtgaatatttttgggagaaaagagttacaggctgccctccatttgacgagcacaaatgtctggctgagggcggcaagattatgaagatacctgggacttgctgcgatacctgcgaggaacctgagtgcaacgacatcacagccagattgcagtacgtcaaggtggggtcctgcaagtccgaagtggaggtcgatattcactattgccaggggaagtgcgccagtaaggcaatgtattctattgacatcaatgacgtccaagatcagtgttcttgctgtagccccaccagaactgagcccatgcaagtagcgttgcattgcactaatggaagcgtcgtgtaccacgaagtcttgaatgcaatggagtgtaaatgctcccctcgtaagtgcagcaaa

SEQ ID NO: 21301 - DNA, 8439 bp, synthetic construct
  misc_feature 1..8439: note = source = /note="Description of Artificial Sequence: Synthetic coding sequence"
  source 1..8439: mol_type = other DNA
atgatacctgcgaggtttgctggcgtgttgttggcgctagccctcattttgcccggaaccctgtgcgcagaagggacaagagggaggtcttctacagctcggtgtagtctgtttggtagtgactttgtgaacacgttcgatggttctatgtatagcttcgccgggtattgctcttacctgttggcaggcgggtgccaaaagagaagcttctccatcatcggagatttccaaaacgggaaacgcgtctcattgtctgtatatcttggagaattttttgacattcacttattcgtcaacggaaccgtgactcagggcgatcagagggttagtatgccttacgcgagtaagggcctgtatctggaaaccgaggctggatactacaagctgtctggggaggcttatggcttcgtagcgcgcattgacggatctggcaatttccaggtgttgttgagcgatcggtactttaacaagacctgtggcttatgcgggaactttaatatcttcgctgaggacgacttcatgacccaggagggcactctaacgtcggatccgtatgacttcgccaacagctgggccctttcatcgggagagcagtggtgtgaacgcgcgagccccccgtcctcctcctgcaacattagttccggagaaatgcagaagggcctgtgggagcagtgccagctgctaaaatctaccagcgtgttcgctagatgtcatccgctggttgacccagagcccttcgtggcattgtgcgagaagacactgtgcgaatgcgccggcggattggaatgcgcgtgtccagccctgctggaatacgctaggacttgcgctcaagagggaatggtgctttacgggtggaccgatcacagcgcgtgctccccagtgtgccctgccggcatggaataccggcaatgcgtctctccctgcgctcggacttgccagagccttcacatcaatgagatgtgccaagagagatgtgtagatggttgtagctgcccagaaggacagctgctggatgagggcctgtgtgttgagagcacagaatgcccatgcgttcacagcggcaagagatacccacctggaacttcattgtccagggactgtaatacttgtatctgtaggaactcacagtggatatgttccaatgaggagtgccccggcgagtgtctcgtgaccggccagagccatttcaagagtttcgacaatcgatatttcacatttagcgggatttgccagtacctcctcgcgcgcgactgccaagaccattctttttctatcgtgatagagacggttcaatgcgccgatgaccgggacgccgtatgcacacggagcgtcactgtgcggctgccgggcctccacaattcgctcgtgaaactgaaacatggcgcgggcgtggctatggatggtcaggacgttcagctgcccctgctgaagggggacctgcggatccagcacactgttactgcaagtgtgaggctgtcctacggtgaagacctgcagatggattgggacggcaggggccggctactggtgaagctgagccctgtgtacgccggcaaaacgtgcgggttgtgtggaaactataatggaaatcagggagatgactttctcactccctccggcttggctgaaccccgcgtggaggacttcgggaacgcatggaaactgcatggtgactgccaggacctacagaagcagcattcagatccttgtgctctcaatccacgcatgactcgcttcagcgaggaagcctgcgccgtcctgaccagcccgaccttcgaggcctgccacagagccgtcagcccattaccatacttgcgcaactgtcggtatgacgtctgttcctgtagtgacggcagagagtgtctatgtggggccctggcatcttacgccgccgcctgcgccgggcgtggggtacgcgtggcgtggcgggagccagggcgatgtgagttaaactgtccaaaagggcaggtatatctgcaatgtggcactccctgtaatttaacgtgccggtcgctaagctacccagatgaggaatgcaatgaagcatgtttagagggttgcttctgtccacccggcttgtacatggatgagcgcggcgactgtgtgcctaaggctcagtgcccttgttactacgacggggaaatcttccagccagaggatatatttagtgaccaccatacaatgtgttattgcgaggatggcttcatgcactgtaccatgagcggcgtccctggctccctgctccccgacgcagtcttgtcatccccactgtctcatcggagcaaacgttccctctcctgtagaccgcccatggtcaagctagtgtgtccggcagataacctgagagcggaaggtctggagtgcacgaaaacttgccaaaactatgatcttgagtgtatgagtatgggatgcgtgtcaggatgcttatgtccccccgggatggtgagacacgagaacagatgtgtcgcgctggaacggtgtccctgcttccaccagggtaaggagtatgcgccaggagagactgtgaaaattgggtgtaacacatgcgtttgccaggacagaaaatggaactgcacagatcatgtgtgcgatgcaacttgctcaactatagggatggcgcactatctgacgttcgacggactgaagtatctcttcccaggagaatgtcagtatgttttggtgcaggattattgcggttctaaccccggcaccttccggatcctcgtcggcaacaaaggatgtagtcatccaagcgttaaatgtaagaaaagggtgaccatcctggtggagggcggggagattgaactcttcgatggcgaagtgaacgttaagcgacccatgaaagatgagacacattttgaagtggtagagtccggtcgatacattatcctgctgctagggaaggccctcagtgttgtgtgggatcgtcatctgtccatctcagtggtgttgaaacagacataccaggagaaagtgtgcgggctatgtggtaacttcgacggtatccagaacaacgacctgacaagcagtaatttgcaggtcgaggaggatcccgtggattttggaaactcttggaaggtttcaagccagtgtgcagatacgagaaaggtaccgctggattcatcccccgcaacctgccataacaatatcatgaagcagaccatggtggactcatcttgtcgcatcctgacgagtgacgtgttccaggactgcaacaagctggttgaccctgagccatacttagacgtgtgcatctacgacacatgctcatgcgagtcgatcggtgactgcgcgtgtttttgtgatacaatcgctgcttatgcccacgtgtgcgcccagcatggcaaggtcgtgacttggcgaaccgccactctctgtcctcaatcctgcgaggagcggaacttgagagaaaatgggtatgagtgtgaatggaggtacaacagctgcgctccggcctgtcaggtcacgtgccagcaccccgagccgctggcatgccccgttcagtgcgtggagggttgtcatgctcactgtcccccgggaaaaatcttggacgaattgcttcagacttgtgttgatcctgaggattgccctgtctgtgaggtcgcgggaaggcgcttcgcttcagggaaaaaggtaacactcaatccatctgacccagaacattgccagatctgtcactgtgacgtggtcaatcttacctgcgaggcctgccaggagcccggggggctggtggtgcctccaaccgacgcccctgtcagtcccactacattgtacgtagaggacatttctgagcctccccttcacgacttctattgcagccgcctgctggatctggtgttcctgctggacggttcgagtaggttatctgaagccgaatttgaggtgcttaaggcattcgtggtcgacatgatggagaggctgcgcatctcgcagaagtgggtgagagttgccgtggtcgagtaccatgacggctcccacgcttacattggcctgaaagatagaaagagaccctccgagttgcggcggatcgcttcacaggttaagtacgcaggctctcaggtagctagcacgagcgaagttcttaaatataccctctttcagatcttcagcaaaattgacagacctgaggcaagtaggatcactctcttgctgatggctagccaggagccccagagaatgagtagaaacttcgttaggtatgtgcagggtctcaaaaaaaagaaggtaatcgtgatacccgtgggcatcggtcctcacgccaacttgaaacaaattcggctaattgagaaacaagcaccagaaaataaagcattcgtcctgagcagcgtcgacgaattggaacagcagcgggacgaaattgtatcctatctgtgtgacctggctccagaagcccccccgccaacactcccccctgatatggcacaagtgaccgtgggacccggtctgctgggggtttccacgttagggcccaagcggaatagtatggtgcttgacgtggcctttgtcctcgaaggcagtgacaaaataggggaagctgactttaataggagcaaagaatttatggaagaagtgatacagcgcatggacgtaggacaggattcaattcatgttactgttttgcaatactcatatatggtcactgtggaataccctttctctgaggcacagtctaagggagacatactccagcgggtgcgcgagattagataccagggtgggaatagaacaaatacaggactggcgcttagataccttagcgatcactcttttcttgtatctcaaggcgatcgagaacaagcccccaacctggtctatatggtaacagggaaccccgcaagcgacgagatcaagcgcctccctggtgatatacaggtggttccaatcggtgtggggcctaatgctaatgtccaggagctcgaaagaattggctggccaaatgcccccattttgatccaggacttcgagaccctgccaagggaagctcccgatctggtattgcagcgttgttgctctggcgagggcctccagattccaacactgagcccagctcccgattgcagtcagcctctggacgtgatattgctcctagatggctccagctcattccccgcgtcctatttcgacgaaatgaaatctttcgctaaggcatttatcagcaaggccaatataggacctagactaacccaggtctcggtgctccaatacggaagtatcacaacaatcgatgtgccctggaacgtcgtccccgagaaagcccacctgttgtccctggtcgatgtgatgcaacgcgaaggcggtccttcccagatcggagacgcccttgggttcgccgtccggtatctcaccagcgagatgcatggtgcacggcctggagcgagtaaggcggttgtgatcctggtgacggatgtcagtgtcgatagcgttgatgcggcagccgacgcagccaggagtaatcgggtgactgtgtttcctataggcatcggagatcgctatgacgctgcacagcttcgtattctggctgggccggctggcgatagcaatgtggtgaaattacagcgaatcgaggacttacctacaatggtaactctgggaaactcattcctgcataagctatgtagcggtttcgtccggatttgtatggacgaggatggcaacgaaaagcggcccggcgatgtgtggacactgcccgaccaatgtcatactgtgacctgtcagcccgacgggcagacactgttaaagtcccatagggtgaattgtgaccgcggacttaggccctcgtgccccaacagccagagccccgttaaggtagaggagacctgcggctgcagatggacctgtccctgcgtttgcaccggatcctccaccagacacattgtgacgttcgacgggcaaaactttaagcttactggttcttgcagctacgtgctcttccagaacaaagagcaagatcttgaggttatcctccacaatggcgcatgttctcccggtgccaggcaaggatgcatgaaatcaatcgaggtcaaacactcagccctgtcagtcgagctccattccgacatggaggttaccgtgaatggaagactagtctctgtcccttatgtcgggggaaatatggaggtgaacgtgtacggggccattatgcatgaagttcggttcaaccatttagggcatatattcacttttacaccacagaacaacgagttccaactccagctcagccccaagaccttcgctagcaaaacttacgggctctgtggcatctgtgatgagaacggcgctaacgactttatgctgagagatggaacagtcaccacagactggaagacactagtccaggaatggacagtacagcgccctggccagacctgtcagcctatcctggaggagcagtgcctcgtgcccgactcaagccactgccaggtgcttctgctacctttgttcgcagagtgccacaaagtgctcgcccccgccaccttctatgcaatttgccagcaggacagctgccaccaggagcaggtgtgcgaggtgattgcctcatacgcgcacctatgccgtactaacggtgtgtgtgttgactggagaacacctgatttctgcgcaatgagctgtccaccaagcttggtgtacaaccactgtgagcatgggtgtccacgacattgtgacggcaacgtttcttcttgcggagaccacccctcagagggatgcttttgtccgcctgacaaggtcatgctagaaggaagttgcgttccggaggaggcctgcacacaatgcatcggcgaagacggcgtgcagcaccagtttctcgaggcatgggtgcctgatcatcagccgtgccagatctgtacctgcctgtccggtcggaaggttaattgtacaacacagccctgccccacagccaaagccccaacgtgcggcttgtgtgaggtagcaaggctgagacagaacgccgaccagtgttgtcctgaatacgagtgcgtgtgcgatcccgtgagttgtgacctacctccggtccctcattgcgagagaggacttcagccgacgctgactaatcccggggagtgtcggccaaatttcacttgcgcatgtaggaaagaggaatgtaagcgcgtgtcccctccgtcatgtccgccccacaggctgcccacacttaggaagacacaatgctgcgatgagtacgaatgtgcgtgtaactgtgttaactcaactgtcagctgtccactcggctacctcgccagcaccgctaccaacgactgtgggtgcactacaaccacctgccttcctgataaagtgtgtgtccatagaagcaccatttacccagtagggcagttctgggaggagggatgcgacgtgtgcacgtgtactgacatggaagatgccgtcatgggcttacgcgtcgcccagtgttcacagaagccatgcgaggatagctgtagatctggctttacatatgtgctgcatgagggagagtgctgtggacggtgccttccctcggcttgcgaggtggtcaccgggtcaccgcgaggagactcgcaatccagctggaaatcagtagggtcccagtgggccagtcctgagaatccctgtctgataaacgagtgcgtgcgagtaaaagaggaggtgttcatacagcagcggaacgtgtcttgcccacagcttgaggtacccgtatgcccatccgggttccagctctcctgtaaaacttccgcgtgttgcccgtcttgccggtgcgaaagaatggaggcctgtatgttgaacgggacagttatcggcccagggaaaaccgtgatgattgacgtttgcacaacctgtcgatgcatggtgcaggtgggtgtcatcagtgggtttaaacttgaatgtagaaaaacaacttgcaacccttgccctctcggttataaagaggagaataatactggtgagtgttgcggtcgctgtctgcctacggcctgcaccatacaactcaggggcgggcagattatgacactcaagagggatgaaactctccaggatggctgcgatacacatttctgcaaagtcaatgagcgtggggagtacttctgggagaagagagtaactggctgtcccccctttgatgaacacaaatgcttggcagaaggtgggaaaatcatgaagatccctgggacttgttgtgatacctgtgaggaaccggagtgcaacgatatcacagcccggctacagtacgtgaaagtcgggtcctgtaagtcagaggtcgaggtcgatatacattactgtcagggcaagtgtgcatccaaggccatgtattccatcgatattaacgacgtgcaggatcagtgtagctgttgctcacctaccagaaccgaaccaatgcaagtagctttgcattgtaccaacgggagtgtcgtgtaccatgaagtgctcaacgccatggagtgcaaatgcagtcccagaaaatgttccaag

SEQ ID NO: 21302 - DNA, 8439 bp, synthetic construct
  misc_feature 1..8439: note = source = /note="Description of Artificial Sequence: Synthetic coding sequence"
  source 1..8439: mol_type = other DNA
atgattccggcgcgcttcgccggcgttcttctagccctggcactgatcctgcctggcactctctgtgcggaaggcactcgcggccgctctagcactgcgcgttgcagcctgttcggctccgacttcgtgaacaccttcgatggttccatgtacagcttcgcgggctactgcagctaccttctggctggcggatgtcaaaagcggtcattctctatcattggggatttccaaaatggtaagcgtgtcagcctaagtgtctacttgggtgagtttttcgacattcacctattcgtgaatggcaccgttacccaaggtgaccagcgggttagcatgccgtacgcgtctaaaggtctatacttggagactgaggccggctactacaaactgtcgggtgaggcgtacggtttcgttgcccgcatagacgggagcggtaatttccaagtgcttttgagcgaccgttactttaataaaacttgcggcctgtgcggcaacttcaacatttttgccgaggatgatttcatgacccaggaaggaaccctgaccagcgatccatacgacttcgcgaacagctgggcactatcctctggtgaacagtggtgtgagcgcgcttccccacctagctctagctgcaacatttccagcggcgaaatgcaaaagggcctgtgggagcagtgccaactgctgaagagtacttccgtgtttgcccgctgtcaccccctggtcgaccccgaaccttttgttgcactatgcgagaaaactctgtgtgagtgtgccggtgggctggagtgtgcttgcccggcactgctggaatacgcccgaacctgcgcacaggaaggcatggttctctatggctggacggaccacagcgcatgctctccagtgtgtccagccggtatggaataccggcagtgcgtgagcccctgcgcgcgtacgtgccagtccctgcacattaatgagatgtgccaagaacgttgcgtggacggttgctcatgtcctgaaggccagctgctggacgagggtctgtgtgtggagagcaccgagtgcccctgcgttcactccggaaagaggtacccacctgggacatctctttctcgtgactgtaatacctgcatatgccggaattcccagtggatatgcagtaacgaagagtgcccaggcgaatgtttggttacagggcagtcccactttaaatcttttgacaatcggtattttacctttagcggtatatgtcagtatctgctggcccgtgactgccaagatcacagcttttcaatcgtgattgagacggtgcagtgcgcggacgatcgagacgccgtttgcactcgctcagtgaccgttcggctgccgggcctgcacaactctctggtgaagctgaaacacggggctggtgtggccatggacggccaggacgttcaacttccactgctgaaaggggacttgagaatccagcatacggtgacagcgagcgttcgcctgtcgtatggcgaagatctgcagatggattgggacgggcgcggccgcttgctggtcaaactgagtccagtttatgccggcaaaacttgcggtctgtgtggcaattacaatggcaaccaaggagacgactttctgaccccaagcgggctggcggaaccgcgtgttgaggatttcggtaacgcctggaagctacacggcgactgccaggatctgcaaaagcaacacagcgacccatgcgccctgaaccctcggatgacgaggttcagcgaagaggcctgtgccgtgctgacgagcccaactttcgaagcgtgtcaccgggcagtcagcccactgccttatcttcgcaactgtaggtacgatgtgtgtagttgctctgacggccgcgagtgtctgtgtggagctctcgccagctatgccgcggcgtgcgccggccgcggggtgcgggttgcctggcgcgagccgggtcgctgtgagcttaattgtccgaaaggccaggtgtaccttcagtgtgggacaccatgcaacctcacttgtaggagcctgagctaccccgacgaggagtgcaatgaggcctgcctggagggctgcttttgccctcctggtttgtatatggatgaacgcggcgactgtgtgccaaaggcccagtgtccgtgctactacgacggtgagatcttccagcctgaagatattttttcagatcaccataccatgtgctactgtgaggatggctttatgcactgtactatgtctggagttccgggttcccttctgccggacgctgttctgagcagcccactgtcccatcgctctaagcgttcattgtcgtgccgcccaccgatggtcaaactggtgtgtccagcagataatttgcgcgcggaaggtctggagtgcaccaagacctgtcagaactacgacctggaatgcatgtccatgggttgcgtcagcggttgcctgtgtccgccaggaatggtacgccacgagaaccgctgcgttgcattagaacgctgcccttgcttccaccagggcaaggaatacgctcccggagaaacagtcaaaatcggatgcaatacttgcgtgtgtcaagatcgcaaatggaattgtaccgatcacgtgtgcgacgcgacctgttcaactatcggtatggcgcactatctgaccttcgacggcctgaaatatctgttccctggtgaatgccagtacgtactcgtgcaagactactgcggtagcaaccccggtacctttagaatcctggtgggtaacaaaggttgtagccacccttctgtgaagtgcaagaaacgagttactattctggtggagggcggtgagatagaattgtttgacggagaagtcaatgtgaaacgtcccatgaaggacgaaactcatttcgaggttgtggaatctggcagatacattatcctgttattaggcaaggcactgagcgttgtctgggacaggcacctgtcaatctcggttgttctgaaacagacctatcaggaaaaggtttgtggcctgtgtgggaatttcgatggtattcaaaacaatgatctgacctcctctaatctgcaggttgaggaagaccctgttgactttggcaatagttggaaggtgtcatctcagtgtgcagatacgcgcaaagtgcctctggattctagccctgcaacttgccacaacaacattatgaagcagactatggtcgacagcagctgccggatcctgactagcgatgtctttcaggattgcaataagctggtggatccggaaccatatctggacgtctgtatttacgacacctgtagctgcgagagcatcggtgactgcgcctgtttctgtgacaccattgccgcatatgcgcacgtgtgtgcgcagcacgggaaggtggtcacatggcgcaccgcgacgctgtgtccccaatcctgtgaagaacgcaacctgcgcgaaaatggctacgaatgtgaatggcgctacaactcctgtgctcctgcgtgtcaggtcacctgccagcacccagaaccactggcctgtccggtgcagtgcgtggaaggctgccatgcccactgcccgcctgggaaaatcttggacgagctgctgcagacctgtgtggatccagaggattgcccagtgtgcgaagtagcgggtcgcagatttgcttccggtaagaaagtgactctgaacccaagcgaccctgagcactgccagatttgccattgcgacgtagtaaacctcacctgcgaagcctgtcaggagccaggcggcctggttgtccctccaacagacgctcctgttagcccgaccacgctgtatgtcgaggacatcagcgagccaccgctgcacgatttttactgttccaggctgctggacttggtttttcttttagacggtagctcccgactgtctgaggctgaatttgaggtcctgaaggcatttgtggttgacatgatggagcgcctccgaatttctcaaaagtgggtgcgcgtcgccgtggtggaataccacgacggttcccacgcatacattggcctgaaagaccgaaaaagaccttcagagctgaggcgcattgcgagccaggtgaaatatgctggctctcaagtagcttccacaagtgaggtcttaaaatataccctattccagatttttagcaagattgaccgccctgaagccagccgcatcaccctgctgcttatggcttcccaggagccgcaaaggatgtcgcggaactttgttcgctacgtgcagggcctaaagaaaaaaaaggtgattgtcattccggtcggtatcggccctcacgccaatctgaaacagatccgcttgatcgagaagcaagcgccggagaacaaagcatttgtcctgtcatctgtcgatgagctggaacagcagcgcgacgagattgtcagctatctgtgtgacctggcacctgaagcgccaccgccaacgctacctcctgatatggcacaggttacggtgggtccaggcctgctgggtgtgtctacactgggccccaaacgcaacagcatggtgttggacgttgcgttcgtgctcgagggctctgacaagatcggtgaggctgacttcaaccgaagcaaggaattcatggaagaagttattcagcgcatggacgtggggcaagattccatccacgtgaccgtcctacaatactcgtacatggtgactgtagaatatccgttttcggaggcacagagtaagggtgacatcctgcaacgcgtccgcgaaatcaggtatcagggtggtaatcgcacgaatactggactggcgctgcgctatctgagcgaccacagcttcttggtgagccaaggtgaccgggagcaagctccaaatctggtgtacatggtgacaggtaaccctgcgtccgatgaaataaagcgcctgcctggcgatattcaagtcgtccccattggcgtgggtccgaatgcaaacgttcaagagctggaacggataggttggcctaatgccccaattctgattcaggacttcgagaccttgcctcgagaggcgccggatctggtcctgcagagatgctgcagcggcgaaggtctccaaattcctaccctgagtccagcccccgattgctctcagcctttagacgtgatcctgctgctggatggaagctcgagctttcccgcctcgtacttcgatgagatgaaatccttcgcaaaagcttttattagcaaggcaaatattggtccgcgcttgacccaggtttctgtcctgcagtacggctctatcacgactatcgatgtcccatggaacgtcgttccggagaaagctcacctgctgtccttggttgacgtgatgcagcgagaaggtggtccgtcacagatcggtgacgctctgggcttcgccgtccgttacctaacaagcgagatgcacggcgctcgtcctggtgcctctaaagcagttgtcattctggttaccgacgtgtctgttgatagcgttgacgccgcagccgacgcagcacgcagcaaccgtgtgaccgtgtttccgattgggatcggcgaccgttacgatgccgcccaactgcgaatactcgcgggaccggcgggcgacagcaacgttgttaaactgcagcgaattgaggatctgccaaccatggtcacgctgggaaattccttcttgcataagctgtgcagtgggttcgtccgtatctgtatggacgaggacggcaacgaaaagagaccgggtgacgtttggactctgcctgaccagtgccacacggtaacctgccagccagatggtcagaccctgctgaaaagccaccgcgtaaattgcgatcgcggcctgcgacctagttgccctaactcgcagagtccagtaaaagtcgaagaaacgtgtggttgccgttggacctgtccatgcgtctgcaccggtagcagcacgcgccacatcgtgaccttcgacggccaaaacttcaaactgaccggcagctgtagttacgttttgttccaaaacaaggagcaggacttggaagtcatcctgcacaatggagcctgctctccaggtgccagacagggttgcatgaaatcaatcgaggtgaaacattctgccctgagcgtcgaactgcacagcgacatggaagtcaccgtaaacggccgcctagtgagtgtcccttatgtgggtggtaatatggaagtgaacgtctatggcgctataatgcacgaggttcgttttaatcacttaggtcatatcttcacgttcactcctcagaataatgagtttcagctgcagttgtcaccaaagactttcgcgtcaaagacctacggtctgtgtggtatttgcgatgagaacggtgcgaacgacttcatgctgcgggatggcaccgtcaccaccgattggaagaccttggtgcaggagtggacagtgcaacggccgggacaaacctgccagccgatcctggaggagcagtgcctcgttccagactcatctcactgtcaggttttactactgcctttgttcgccgagtgtcacaaggtcctcgcaccggccaccttttatgcaatctgccagcaggacagctgccatcaggaacaggtgtgtgaggtcattgcatcatacgcacatctgtgccggaccaatggcgtctgcgttgattggcgtactcctgatttttgtgccatgtcatgcccaccgtcgctggtgtacaaccattgtgagcacggctgtccacgccactgtgatggcaatgtgagcagctgtggcgaccatccttctgagggctgcttctgcccgccggataaggttatgcttgaaggaagctgcgttccagaggaggcgtgtactcagtgcatcggcgaggacggtgtccagcaccagttcctggaagcatgggtaccagatcaccagccttgccagatctgcacctgtttgtccggacgcaaggtgaattgcactacgcagccgtgcccaactgctaaggcaccgacctgcggcctatgtgaagtcgcaaggctgcgccaaaatgccgaccagtgttgtccagaatatgagtgtgtgtgcgatccggtcagttgcgatctgccgcctgtgcctcattgcgagcgcggactgcagccgaccctgacgaacccgggggaatgccgtccaaatttcacgtgcgcgtgtcgtaaggaagaatgcaaacgcgtgtctccaccttcgtgtccgccacataggttgcctaccctgcgaaagacccagtgctgcgatgaatatgaatgtgcttgtaattgcgttaacagcaccgtgtcatgcccgctgggttacctggcatctaccgccactaacgactgtggttgcaccaccactacctgcctgccagacaaggtgtgtgtacatcgctctaccatttacccagtgggtcagttctgggaggagggctgtgacgtttgtacgtgcaccgacatggaggacgcagtgatgggtttgcgcgtcgcccaatgctctcagaagccttgcgaggattcctgccgctctggatttacgtacgtgctgcacgagggtgagtgctgcggtaggtgtctgccgagcgcgtgtgaggtcgtgaccgggtctcctcgcggtgacagccagagctcgtggaagagcgttgggagtcagtgggcaagcccggagaatccgtgtctgattaatgagtgcgtccgcgttaaggaggaagtctttattcagcaacggaacgtctcttgccctcagctggaggttccggtgtgtccgagcggtttccagctgtcatgcaagacctcggcatgctgcccgtcatgccgctgcgagcgtatggaagcgtgcatgttgaacggcaccgtgatcggccccggcaagacggtcatgattgatgtctgcacgacttgtaggtgcatggtgcaggttggagtcatttctggcttcaagctggaatgccgcaagacgacctgtaacccatgtccgctcggttacaaggaggagaataacactggcgaatgctgcggaaggtgcctgcccaccgcgtgcacaattcaactgagggggggccaaatcatgaccctcaagcgtgatgaaacccttcaggacggttgcgatacacatttttgtaaagttaacgaacgcggcgagtacttctgggagaaacgtgtgaccgggtgtccgccttttgacgagcacaaatgtttggcggaaggcggtaagatcatgaagatcccaggcacctgctgtgacacctgcgaggaaccggagtgtaatgacatcaccgcgcgcctgcagtatgtcaaggtcggtagctgtaagtccgaagtggaagttgacattcattattgccaaggcaagtgtgcgtctaaagctatgtacagcattgatattaatgacgtccaggaccagtgtagctgttgcagcccaacgcgcaccgagccgatgcaagttgcgctgcattgcacgaatggtagtgtcgtttaccatgaggtgttaaacgcaatggaatgcaaatgcagtcctcgcaaatgtagcaag

SEQ ID NO: 21303 - DNA, 8439 bp, synthetic construct
  misc_feature 1..8439: note = source = /note="Description of Artificial Sequence: Synthetic coding sequence"
  source 1..8439: mol_type = other DNA
atgatacccgctcggtttgctggcgtattgctcgcgcttgcgctgattctaccaggcaccctgtgtgccgaagggacgagaggccggagttccactgcacggtgttccctgtttggaagtgatttcgtgaacacgttcgatggctcaatgtatagcttcgccggctattgttcctatcttctggcaggcgggtgtcagaagcgatcctttagtatcatcggggatttccagaatgggaaaagagtcagcctcagcgtgtacctgggtgaattctttgatatacacttatttgtgaatggaactgtgacccagggtgaccaacgagtttcaatgccctatgcatcaaagggtctgtacctcgagacagaagctggctattacaaactgtccggagaggcatatgggttcgtagcccgaattgatggaagcggcaacttccaagtgcttctttcagaccggtattttaataagacttgtgggctatgcggtaatttcaatatattcgctgaagacgatttcatgactcaggagggaacattaacgagcgatccctacgattttgccaactcttgggccctctctagtggcgagcagtggtgcgaaagagcttctcccccttctagcagctgcaacatctcaagcggcgaaatgcaaaagggcctatgggagcagtgtcagctgctgaaatctacgtccgtcttcgcccgctgccacccactggtggaccctgagccattcgtggctctgtgtgagaaaacactctgcgagtgtgcggggggactggagtgtgcatgccccgcgctactggaatatgctcgtacctgcgcgcaggaaggaatggtgctgtatggatggacggatcattccgcgtgctcacctgtgtgtcccgcggggatggagtaccgccagtgtgtgtcaccctgcgctcggacatgtcagagcttgcacattaatgagatgtgccaggagagatgtgtcgatgggtgctcatgcccagaagggcaattgctggatgagggcctgtgtgtggaatctaccgaatgtccctgtgttcactctggaaaaagatacccacctggtacgtcactcagcagggattgcaatacctgcatctgccggaattctcagtggatctgttccaacgaggagtgtcctggcgagtgcctggtcaccgggcagagtcacttcaaaagcttcgataacaggtattttacatttagtggcatctgccagtacctactggcccgggactgccaggaccactcatttagtatcgttatcgagacagtccagtgcgctgacgacagagacgcggtttgtaccagaagcgtgactgttagactacctggtttacacaactcattggtgaaactgaagcatggtgccggagtggcgatggatggtcaggacgtgcaattaccattgctcaaaggggatttaaggattcagcacacagtaactgccagcgtcagactgtcatatggtgaggacctgcagatggactgggatgggagagggcggctgctagtgaaactgtcgcctgtgtatgccggcaagacttgcggcctgtgtggcaattataacggcaaccagggagatgattttcttacacctagcggactggctgaacctcgagtggaggatttcggaaacgcttggaaattgcatggcgactgtcaggacctccagaagcagcacagcgatccttgcgctctgaatcctaggatgactaggttttccgaggaagcatgtgccgtcttaacttcaccgacatttgaagcctgtcaccgagccgtttcccccctgccctacctgaggaattgcaggtacgatgtatgtagctgttccgatggccgcgaatgtctatgtggtgcactggctagctacgctgcagcgtgtgcaggaaggggcgtgcgagtggcatggcgggagcctgggcgttgcgaacttaattgccctaaaggacaagtatacttgcagtgcgggactccttgtaacctcacgtgccggtcgctctcctaccctgatgaggagtgtaacgaagcatgccttgaagggtgcttttgtccacctggtctctacatggacgagagaggagattgcgttccaaaagcgcagtgtccctgttactatgacggagagatatttcagcctgaggatatattctccgatcaccatacaatgtgctactgtgaggacggctttatgcattgcacaatgagcggagtgcctgggtcccttctgccagatgctgtgctgagctctccgctctcgcacaggtctaagcggtccttgtcctgccgtccacctatggtgaaactcgtctgccccgctgacaatttgagggctgagggtctcgagtgcacaaagacatgccaaaactatgatctcgagtgtatgtccatggggtgcgtgtcgggctgcctgtgtccaccgggaatggtgagacatgagaatcgctgtgtggcactggagcggtgtccctgcttccatcaaggcaaggagtacgcacccggtgagaccgtcaaaattgggtgtaacacctgcgtctgccaggatcgcaagtggaactgtactgatcacgtgtgtgacgctacctgttccacaattggcatggctcattatctgacatttgacggcctcaagtatctgtttccaggcgaatgccagtacgtgctggttcaagactactgcggaagcaaccctggtacttttcggattctcgtggggaacaaaggctgcagccaccccagtgtaaagtgtaaaaaaagagtgacgatactggtagagggcggagagattgagctgttcgatggtgaggtgaacgtgaagcgccccatgaaagatgagactcacttcgaggttgtcgagtcaggacggtatatcatactgctcttaggaaaagctttatcagtggtgtgggatcgccacttgagtatcagcgtggtgctcaagcagacatatcaggaaaaagtgtgtggtctgtgcggcaatttcgatggaattcagaataatgacctgacgtcttcaaatcttcaggtcgaggaagatccagtagacttcggtaattcttggaaggtgagttctcagtgcgcagacacgcggaaggtgcccctggacagctccccagcaacctgtcacaacaatatcatgaagcaaacaatggtggattctagctgtcgcattctcacttcagatgtttttcaggattgtaacaagttggttgacccagagccctatttagacgtgtgcatctatgatacttgttcctgcgagtcgattggggactgcgcgtgcttctgcgataccattgccgcctacgcgcacgtttgtgctcagcacggaaaagtggtgacctggcgcaccgctactttgtgcccacagtcttgtgaggaacgtaacctgcgggagaacggctacgaatgtgaatggcggtacaactcatgtgctcccgcatgccaggtgacatgccagcatcccgagcccctggcttgtccggttcagtgtgtagagggctgtcatgcacactgccctccaggaaaaatcctggatgaactgctgcagacttgcgtggacccagaagattgcccagtctgcgaagttgctggccgtcgctttgctagtggaaagaaagtaaccttgaacccatcagatcccgaacactgtcaaatttgccactgtgacgtggtaaacctaacatgcgaggcatgtcaggagcccggtggcctggtggtgccgcccacagacgcaccagtgtctcccacgacactgtacgtagaggatatctctgaaccgccccttcatgatttctactgtagtcggcttctggacctggtgtttcttctagacggctcatcgagactgagcgaagcggagttcgaggtgcttaaagcctttgtagtggacatgatggagagattgaggatctcccagaagtgggtgagagtggctgtggtcgagtatcacgacggctcgcacgcctacatcggtctcaaagaccgcaagagaccatctgaactgcgtcggatcgcgtcacaggtgaaatacgctggcagccaagtcgcaagtacttcggaggtgctgaaatatacactgtttcaaattttttcaaaaattgacaggcccgaagctagccggattaccctattactcatggcgagtcaggaaccccagcggatgagcagaaacttcgtcaggtacgttcagggtctgaaaaagaaaaaagtaatcgtcattcccgttgggattggccctcatgccaacctgaagcagatccgcctgatcgaaaagcaagctcccgagaacaaagctttcgtccttagcagcgtcgacgaactagagcagcaacgagacgagatagtgagttatctctgtgaccttgcgccggaggccccaccccctaccctgccccctgacatggcccaggtaacagtggggcccggtcttttgggcgtttccacactcggaccaaaaagaaatagcatggtcctggacgtcgctttcgtgctggaaggctccgacaaaattggagaggcagacttcaatagaagcaaagaattcatggaggaggtaatccaacgcatggatgtgggacaggactctatacatgtgacggtcttgcagtacagttacatggtgactgtcgagtacccattttcagaggctcagagcaagggagacatcctgcagcgcgtgcgcgagatccgctaccagggtggaaatagaactaatactggcctcgcattgcgttacttgagtgaccactcctttctggtatcgcagggcgatagggaacaggccccgaacctcgtatacatggtcacgggaaacccggcttccgatgaaataaagaggttacccggagacattcaggtcgtgcctattggtgtcggacctaatgcaaatgttcaggagttggagagaataggttggcccaatgcgcccatcctgatacaggacttcgagacgctacccagggaggcacccgacctggtccttcaacggtgctgtagcggcgagggactgcaaatcccaactctgtcacccgccccagattgttcccagcctctcgatgtgatcttgttactggacggctcgtccagttttccagccagctacttcgatgagatgaagtcttttgcgaaggccttcatctcgaaagcaaatataggaccgcgtcttactcaggtcagcgtgcttcaatatgggagtattacgaccatcgatgttccctggaacgtggtgcccgagaaagcccacctcttaagcctggtggacgtaatgcagcgcgaaggcggcccaagtcagattggggacgcacttggatttgccgtgcggtacttaactagtgaaatgcatggagcaagacccggagcaagtaaagccgtggtaatactcgtgaccgatgtgagtgtggatagtgttgacgcagctgccgacgccgcgcggtccaatcgggtgacagtcttcccaataggtatcggcgacaggtacgacgccgcccagttgagaattcttgctgggcctgcaggtgattcaaatgtggtgaagctgcagagaatagaggatcttcccactatggtcaccctcggtaactcatttctccacaagctgtgctctggatttgtgaggatttgcatggacgaggacggaaacgagaaacgtccgggagacgtttggacgctgcctgaccagtgtcacactgtaacatgtcagcccgatggccagaccctcctcaagagccatcgagtaaattgtgacagaggcctgcgtccgtcatgccctaattctcaaagccccgtcaaagtagaagagacttgcggctgcagatggacttgcccatgtgtctgcaccggcagcagtacccggcacatagtgacgttcgatggccaaaatttcaaattgaccggtagctgcagctatgtgctgtttcagaataaggagcaagatctggaagtaattctgcacaacggagcctgctcaccaggcgctaggcagggatgcatgaagtcaattgaagtgaagcacagcgctttgtccgtcgagctccattcagacatggaggtgaccgtcaacggcaggctggtcagcgtgccatatgttggcggtaatatggaggtcaatgtctacggggcaattatgcacgaagtgcgatttaaccacctaggccacatcttcaccttcaccccccagaacaatgaatttcaactgcagctgtctcctaagaccttcgcaagcaaaacctatggcctctgcggcatctgcgacgagaatggcgcgaacgatttcatgttgcgagacggaactgtgacgacagactggaagacactggtgcaggagtggactgtccagcggcctgggcagacctgccagcccatcctggaagaacagtgcctcgtgcctgattcctcccactgtcaggttctgttattaccactctttgcggagtgtcacaaagtgttggcaccagcaacattttacgctatctgccagcaggactcctgtcatcaggagcaggtatgcgaagtaattgcgagttatgcccacctgtgtcgaacgaatggcgtgtgtgttgactggcgcactcccgacttctgcgccatgagttgccctccctctttggtctataaccattgcgagcacggttgtcctcgacattgtgatggcaatgtgtcaagttgcggcgatcatccctcagaggggtgcttttgccctcctgacaaagtaatgttggaagggagctgcgtgcctgaagaagcgtgtacacaatgcatcggcgaagatggggttcagcaccaattcctggaggcctgggtaccagaccaccagccatgccagatatgtacatgtttgtctggtcgtaaagtaaactgcacgacccagccatgccccacagcgaaggctcctacgtgtggcttgtgtgaagttgcccggctgcgccagaacgccgaccagtgttgccccgagtacgaatgcgtgtgtgatcccgtatcctgtgatcttccacccgttccccattgcgagcgcggtctgcaaccgacactaaccaacccaggagaatgccgcccgaactttacttgcgcttgtcggaaagaggagtgtaagagggtgagccccccgtcctgtcctccacaccggcttcctacgctgcggaagactcagtgttgcgatgaatacgagtgcgcgtgcaattgcgtgaatagcaccgtatcttgccccctcggataccttgcgagcacagccaccaatgactgtggttgcaccacgactacctgcctgcctgacaaagtgtgcgtgcaccggtcgactatctatcccgtcgggcagttttgggaggagggatgtgacgtttgtacatgtacagatatggaagacgctgtgatggggttacgagtcgcacaatgtagtcagaagccatgtgaggactcttgtcggtctggtttcacatacgttctgcacgagggagaatgttgtggccgctgtctgccctccgcatgtgaagtcgtaaccggatccccccggggtgactcccagagctcttggaagtctgtgggctcacaatgggcatcccctgagaacccctgcctcattaatgaatgcgttcgtgtcaaggaagaagtgttcatacagcagagaaatgtgtcatgcccacagcttgaagtgcctgtgtgccccagtggatttcagctgtcatgtaagactagtgcctgctgtccctcgtgccggtgcgaaaggatggaagcatgcatgttaaacggcactgtgatcggacctggcaagacagtgatgatagatgtgtgtacgacctgccggtgtatggtccaggtgggtgtcatttcaggcttcaaattggagtgccggaagaccacatgtaatccctgtccactcggatacaaggaagagaacaacacaggtgagtgctgcggccgctgcctgcctacagcctgcacgatccaattaagaggtggccaaattatgacactcaaacgggatgagacactccaagatggctgtgacacacatttctgtaaggtcaacgagaggggcgaatacttctgggagaagcgcgtcacaggatgtcctcctttcgatgaacataagtgtctggcagagggaggcaagatcatgaaaatcccagggacctgctgtgacacctgcgaggaaccggagtgcaacgatatcactgcccgtctgcagtacgtaaaggtgggctcatgtaaatccgaagttgaggtggatatacattactgccaaggcaagtgcgcctcaaaggcgatgtactccatcgatatcaacgacgttcaagatcagtgtagttgttgctctcctacacggacagagccgatgcaggtggctctgcattgcacaaacgggagtgtggtctatcacgaagtgttaaacgcgatggaatgtaagtgtagcccaagaaagtgctctaag

SEQ ID NO: 21304 - DNA, 8439 bp, synthetic construct
  misc_feature 1..8439: note = source = /note="Description of Artificial Sequence: Synthetic coding sequence"
  source 1..8439: mol_type = other DNA
atgatccccgcaaggttcgccggagtccttctcgcactcgcactaattctacctgggactctctgtgctgagggaactcgtggacggtctagtacagctcggtgttccctgttcgggtctgactttgtgaatactttcgatggatctatgtattctttcgccgggtactgtagttacctcctagctggagggtgccagaaaaggtcattctctatcatcggggatttccaaaatggaaaaagggtgagtctgtcagtataccttggagaatttttcgatatccatcttttcgtcaacggaactgtcacacagggggatcagagggtgtcgatgccttatgcatctaagggactttatctcgaaactgaagcagggtattataagctttcaggagaagcctatggatttgtcgctagaattgatgggtccggaaactttcaggtgctcctctccgatagatacttcaacaaaacatgcgggctctgtgggaactttaatatattcgctgaagacgattttatgactcaggaaggaactcttacatccgatccttatgatttcgccaactcatgggccttatctagtggggaacagtggtgtgaacgggcttctcccccttcctcctcctgcaatatctcttccggggagatgcagaagggactctgggaacagtgtcagctgctaaaaagtactagtgtttttgcccgatgccaccctcttgtggatccagaaccattcgttgccctctgtgaaaagacactatgcgaatgtgcaggaggactggaatgtgcttgtcccgctttactggagtatgccagaacatgtgcacaggaagggatggtcctgtacgggtggacagaccattctgcatgttcaccagtgtgtccagctgggatggaatatagacagtgtgtttcaccctgcgcgcgcacatgtcaaagtttacatatcaatgaaatgtgccaggagcggtgcgtcgatgggtgttcatgccctgaaggacagcttctcgatgagggactttgtgtggaatccacagaatgtccttgcgtccattcaggaaaacgctaccctcccggaacatccctctctagagattgtaatacatgtatctgcagaaattctcagtggatatgctcaaatgaggagtgtcctggagagtgcctggtcacaggacagtctcactttaaatctttcgataacagatattttacattctccggaatttgtcaatacctgctagcaagagattgtcaggaccactccttctctattgtcatagaaacagttcaatgcgccgatgatcgagatgcagtgtgtactcgtagtgtcacagtacggctgcccgggcttcataatagtctggtgaaattgaaacatggagcaggggtggccatggatggacaggatgtccagctaccattactaaaaggggatctcagaatacagcacactgtgacagctagtgtgcgcttgagttacggagaagatctacaaatggattgggatggacggggacggctactcgtgaaactctctcctgtgtatgccgggaaaacatgtggactgtgtgggaattataatgggaaccagggggatgattttctcacacctagtggactggccgaaccccgggtcgaagatttcggaaatgcctggaagctgcatggggactgccaggacctccagaagcagcatagtgatccatgtgctctcaatccccggatgactcggttctctgaggaggcttgcgctgttctcacttctcctacattcgaagcctgtcaccgtgcagtgagtccactcccctatctacgtaattgtcgatatgatgtctgctcatgttctgacggaagggaatgtttatgtggagccctcgcgagttatgccgccgcatgtgcaggaaggggggtccgcgttgcatggcgggaacctgggagatgtgaacttaactgtccaaaaggacaagtctatttgcagtgtgggacaccctgcaacctgacttgcagatccctgtcttaccctgatgaagagtgcaatgaggcttgcctggaggggtgtttctgtcccccagggctatacatggatgaaaggggagattgcgtgcccaaagcccagtgtccctgctattatgatggggagatcttccagcccgaggacatttttagtgatcatcacactatgtgctattgcgaggatgggtttatgcattgtacaatgtccggggtacctggatcactcctgcccgatgccgttctatcttcacctctgtctcatcgctcaaagcgctcattgtcatgtcggcctcctatggtgaaattagtttgtcccgctgacaatttgagggcagaaggactagaatgcactaaaacatgccagaactatgatcttgagtgcatgtctatgggatgtgtctctggatgtctctgccctccagggatggtgaggcatgaaaatcggtgtgtagccctggaacggtgtccctgtttccaccagggaaaagaatatgcccccggggaaactgttaaaataggatgcaatacatgtgtgtgtcaggatcggaaatggaattgcactgatcatgtttgcgatgcaacttgctcaacaataggaatggcacactatctaacatttgatggacttaaatacctcttccctggagaatgtcagtatgtactggttcaggattactgtggatctaaccccggaactttccgcatcctcgtagggaacaaaggatgttcccacccctcagtaaaatgcaaaaaacgagtgactatccttgtcgaggggggagaaattgaactgtttgatggagaagtcaacgttaaacgcccaatgaaagatgaaactcatttcgaagtggttgagagtgggagatacataatcctgctgctcgggaaggcattatcagtagtatgggatcgccacttgtctatatccgtggtcttgaagcagacttaccaggagaaagtttgcgggctgtgtggaaacttcgatggaatccagaataacgatctcacttcttccaatctgcaggtggaggaagatcctgtggatttcgggaactcctggaaagtctcctctcagtgtgcagatacaaggaaagtgccccttgattcctccccagccacatgccacaataacataatgaaacagacaatggtcgactcttcttgtaggatccttacatccgatgtattccaggattgtaacaaactcgttgatcccgaaccctatctggacgtgtgtatatatgatacttgttcctgcgagtctatcggagattgcgcttgcttctgtgatacaatagctgcctacgcccatgtgtgtgcacagcatggaaaagtagtgacatggcgaactgctacactctgtcctcagagttgcgaggaacgaaacctgcgggaaaatgggtatgaatgtgaatggagatacaacagttgtgcacctgcctgtcaggtgacatgtcagcaccccgagcctctcgcttgccctgtgcagtgtgtggaaggatgccacgcccattgccctcctgggaaaattcttgatgagcttttgcagacatgtgtggatcctgaagattgtcctgtttgtgaagtggcaggacggagattcgcatctgggaaaaaagtgacactcaacccatcagatcccgaacactgccagatctgtcattgtgatgtggtgaacctcacatgcgaagcttgccaggagccaggaggactcgtggtacctcccactgatgcccccgtgagtcccacaactctctatgtcgaagatatcagtgagccacccctccatgatttttattgttcccgactgctggatcttgtatttctcctggatggatctagtcggttgtctgaggcagaattcgaagtgctcaaagccttcgtcgtggacatgatggaacggctacggatcagtcagaaatgggtccgcgtggcagtggtagaatatcacgatggatcccacgcatatatcgggcttaaagatcggaaacggccaagtgaattacggaggatcgcctctcaagtaaaatatgccggatcacaggtcgcctccacatctgaagtcctaaagtacactctctttcagatcttttctaagatagatcggccagaggcttctcgaataacactcttgctcatggcttcccaggagcctcagcggatgtcccgcaattttgttcggtatgtccagggattaaagaaaaaaaaagtcatcgttatacctgtcggaatcgggcctcacgccaacctcaagcagatcaggctcattgaaaaacaggcccctgaaaacaaagcctttgtgttgtcaagtgtggatgagcttgagcagcagcgcgacgaaatagtgtcttacctctgtgatctcgcaccagaagctcccccccccacattgcctccagatatggcgcaggttacagtcggacctgggctcctaggggtttcaacactcggacctaaaagaaactcaatggtgttggatgtcgcgttcgtgctcgaagggtctgataaaattggagaagccgactttaatcggtctaaagagttcatggaagaagttatacagaggatggacgtcggacaggacagtattcacgttacggtacttcagtattcctatatggttacagtcgagtatcctttttccgaagcccagtccaaaggagatatactgcagcgggtgcgcgaaatccggtatcagggagggaataggactaacactgggctagcactaagatatctctctgatcactcattcttggtttcccagggggacagggaacaggcccccaacctagtctatatggtgactggaaaccccgcgtctgatgaaataaaacggctaccaggggacatacaggtcgtacccatcggagtgggacctaacgctaatgttcaggaactcgaaaggattggatggcccaacgcgcctatccttatccaggattttgagactctgcctcgggaagccccagatctagtgctccagaggtgttgtagtggggaaggactgcagatcccaactctttctccagctcccgattgctcccagcccttggatgttatcctgctattggacggatcctctagtttccctgcgagttactttgatgagatgaaatctttcgcaaaagccttcatatctaaagctaatatcggacccaggctgacacaggtatctgtgcttcagtacggatccatcactacaatagacgtaccctggaatgttgtacccgaaaaggctcacctgctgtccttagtggatgtcatgcaaagagaagggggaccttctcagataggggacgctctcgggttcgctgtgcggtacctcacatctgaaatgcacggagcccggccaggagcatctaaggcagtggttatcctggttacagatgtgtccgtggattcagtggatgccgctgctgatgccgcaagaagtaaccgggttacagtgtttcccataggaatcggagatcggtatgatgctgctcagctacggatcctcgcaggaccagcaggagattctaatgttgttaaattacagcgaatagaggacctacctacgatggttacactcggaaactctttccttcataaattatgttcagggtttgtccggatttgtatggatgaagatggaaacgaaaaacgccccggagatgtgtggacacttcctgatcagtgccatactgtgacatgccagcctgatgggcaaactctcctgaaatcacaccgggttaattgtgataggggacttaggccttcttgtcctaattcgcaatcaccagtgaaagtggaggagacttgcgggtgcagatggacatgtccatgtgtatgcacagggtcttccacaaggcacatcgtgacatttgatgggcagaacttcaagttaacaggatcttgctcttatgtacttttccagaataaggaacaggatttagaagtaatactccacaatggggcctgctctcctggagcccgtcaggggtgtatgaaaagtatcgaagtaaaacactctgccttatctgttgaactccatagtgatatggaagtgactgtgaacgggagactcgtcagtgtgccttatgtgggaggaaacatggaagtgaacgtctatggagccatcatgcacgaagtgcgcttcaaccacttggggcacatattcacatttactccccagaacaatgaattccagttgcagctgagtcctaaaactttcgcttctaaaacatatgggctgtgtggaatttgtgatgaaaatggagcaaatgattttatgctaagagatgggactgtcacaactgattggaaaacacttgtgcaggagtggacagttcagcggccaggacagacatgtcagcccattcttgaagaacaatgtctggtgccagactcatctcactgtcaggtgctgctcttaccactctttgccgagtgccataaggtgctcgcaccagccacgttctatgccatttgccagcaggattcgtgtcatcaggaacaggtgtgcgaagtaattgcttcttacgcccacctgtgtcgcacaaacggggtttgtgtcgattggagaacacctgatttctgtgcaatgtcctgtcccccgtccctcgtatataatcattgtgaacatgggtgcccacggcattgtgacggaaacgtatcttcatgtggagaccatcctagtgaagggtgtttttgtcctcccgataaggtgatgttggaaggatcctgcgtacccgaggaggcctgcactcagtgcataggagaagacggggtgcagcatcagtttctagaagcttgggttcccgatcatcagccctgccagatttgtacttgtttatccgggagaaaagtgaactgtactactcagccatgtcccactgccaaagctcccacatgcgggctttgcgaagtggcacggctacgacagaatgcagaccaatgttgtcctgaatatgagtgcgtgtgcgatccggtgtcgtgcgatcttcctcctgtgccacactgtgaacgcgggttgcagcctacactaacaaaccccggagagtgtagacctaatttcacttgcgcatgccgcaaagaagaatgtaaacgagtgtctcctccttcctgtcctccacaccggttacctactcttcgcaaaactcagtgttgtgatgaatacgaatgtgcctgtaactgcgtgaattctactgtgtcgtgccctctaggatatctcgcttccactgcaactaatgattgtggatgcactactacaacttgcctcccagataaggtgtgcgtccatcggtccactatatatcctgtggggcaattttgggaagaagggtgtgatgtgtgtacttgtacagacatggaagatgcagtgatgggactccgcgtcgcacaatgctcgcagaaaccatgtgaagatagttgtcgctctgggttcacatatgtactgcacgagggagagtgttgcggaagatgcttgcctagtgcctgcgaagtggtcacagggtcgccacgcggagattcccaatcttcttggaaatctgtggggtcccagtgggcttctccagaaaacccctgtctgatcaatgaatgtgttcgcgtgaaggaagaagtgttcatccagcagcgaaacgtgtcatgcccacagctggaggtcccagtgtgtcccagtgggtttcagctatcttgtaaaacatcagcctgctgtccatcttgccgttgcgaacgaatggaagcttgcatgctcaatggaacagtaataggacccggaaagacagtgatgatcgatgtgtgtactacatgcagatgtatggtgcaggttggagtcatctccgggtttaaactggaatgccgcaaaacaacatgcaatccgtgtccactaggatataaagaagaaaacaatactggagaatgctgcgggaggtgtctgcctactgcctgtacgatccagctccggggaggacagatcatgacactgaaaagggatgagactctccaagatgggtgcgatacacatttttgtaaagtgaacgaaaggggagaatacttctgggagaaacgagttacaggatgcccccctttcgacgaacacaaatgtcttgccgagggaggaaagataatgaagattcccggaacttgttgtgatacatgtgaagagccagaatgtaacgatataacagcacgactccagtacgtcaaagtggggtcttgcaaatcagaggttgaggtggatattcactattgtcaggggaaatgtgccagtaaagctatgtattctattgatatcaacgatgtccaggatcagtgctcatgctgctctcccacacgaacagagcccatgcaggtcgctctccactgtacaaatggatccgtagtataccatgaagtcctcaacgccatggaatgtaaatgttcgccccgaaaatgcagtaag

SEQ ID NO: 21305 - DNA, 8439 bp, synthetic construct
  misc_feature 1..8439: note = source = /note="Description of Artificial Sequence: Synthetic coding sequence"
  source 1..8439: mol_type = other DNA
atgattccggctagattcgcgggcgtgctgcttgctcttgctctgatactcccaggcacactgtgcgctgaagggacaaggggcagatcctccacggccaggtgctcactgtttggttccgactttgtgaatacctttgatgggtcaatgtattcctttgccggttactgctcttacttgttggccggtggctgccagaaaaggtcattctctatcattggggactttcagaacggcaaacgagtgtctctcagcgtgtatctcggggagtttttcgacatccatctctttgtcaatgggaccgtgacacaaggcgaccaacgcgtcagcatgccatacgcttctaaaggcctgtacctggaaacagaggctggatactataagctttctggcgaggcgtacggattcgtcgctaggatcgacggtagtggcaattttcaggtgctgttgagcgaccgctattttaacaaaacctgcggactgtgtggaaacttcaacatcttcgccgaggacgactttatgacacaggagggcacacttactagcgacccgtacgactttgcaaactcatgggcactgagttccggggagcagtggtgcgagagggcaagtccaccgtcaagctcttgcaacatcagtagtggagagatgcagaaaggtttgtgggagcagtgccagttgttgaaatccacctctgtctttgctcggtgtcatcccctggtcgaccctgaaccttttgtggccctctgcgagaagacgctctgtgagtgtgccgggggccttgaatgcgcttgccctgcgttgctggagtatgcgcgcacctgtgcccaggaggggatggttctgtatggctggacagaccacagtgcatgctccccagtgtgcccagccggcatggaatacaggcagtgcgtgtccccctgtgccaggacatgtcaaagtctgcacattaatgagatgtgtcaggaacgctgcgttgacggttgttcatgcccggaggggcagctcctcgacgagggcctgtgtgtggagagtactgagtgtccttgcgtgcacagcggtaaaaggtaccctccgggcacatcactctctcgcgactgtaacacatgcatctgccgcaattctcagtggatctgtagtaacgaggagtgcccaggcgagtgcctggtaacggggcagtctcattttaagagctttgacaaccggtacttcaccttcagcggaatctgtcagtatctgctggctagggactgccaggatcactccttctcaatcgtcatcgagaccgtgcagtgtgcggacgatcgagacgcagtatgcacacggagcgtgaccgtaagactgcctggactgcataacagtttggtaaagctgaagcatggcgcaggcgttgcgatggacgggcaggatgtgcaactccctctgctgaagggagatctgagaattcaacatacagtaaccgccagcgttcgcctctcttatggggaggacctgcagatggactgggacggacgcggaaggctcctcgtgaagctcagtcctgtgtacgctgggaaaacatgtggtctctgcggtaactataacggcaaccaaggcgatgattttttgacccccagcgggttggcggaacccagggttgaagattttgggaatgcatggaaactccatggcgactgtcaggatctgcagaagcagcatagtgatccatgtgcacttaaccctcgcatgacacggttcagtgaagaggcctgtgctgtgctgacttctccaacatttgaggcctgtcacagagccgtgtcacccctgccctacctccgaaactgccgatacgacgtgtgttcttgttccgacggcagggaatgcctgtgcggcgccctggcctcctatgcagcagcttgcgcaggacggggagtgcgggtcgcttggcgggaacctggccggtgtgagttgaactgtccgaagggccaagtttatctgcagtgcggtaccccttgcaatctgacgtgccgatctctctcctatcctgacgaggagtgtaatgaggcctgcctggagggatgcttctgcccacccggcctttatatggacgagcgcggcgattgcgtccccaaagcccaatgcccatgctactacgacggggaaattttccagccagaagatattttcagcgaccatcacacaatgtgctattgcgaggacggatttatgcattgcactatgagcggcgtacctggaagtctgcttccagacgccgtgctgagtagtccactgagccaccgcagtaagaggtccttgtcctgcagaccaccaatggtcaaactcgtttgtccggccgacaacctgcgcgctgaagggctggaatgcacaaagacttgccagaactatgacctggagtgtatgtctatgggctgcgtgagcggatgtctttgtccccctgggatggtgcgacacgaaaaccgatgtgtagccctggagcggtgtccatgcttccaccaggggaaagaatatgccccaggggagactgtgaagattggctgcaacacctgcgtgtgccaggacagaaagtggaactgtactgaccatgtgtgcgacgctacatgctctacaatcggaatggcccactacctgacattcgatggactgaaataccttttccccggagagtgccagtatgtcctggtgcaggattactgtggaagcaaccctggcaccttcagaatccttgtggggaataagggttgctcacatccctcagtcaaatgtaagaagcgcgtgaccatcctggtagaaggcggcgaaattgagctcttcgatggtgaggtgaacgtgaagcgaccaatgaaagatgagacacattttgaagtcgttgagtccggaagatacatcattttgttgctcgggaaagctctcagcgtggtttgggacagacacctttccatatcagtggtgttgaagcagacataccaggagaaggtgtgcggactgtgcggtaactttgacggaatccagaataacgacctcacatctagtaacctgcaagtggaggaagacccggtcgattttgggaactcatggaaagttagttcccagtgtgccgacacaaggaaagtccccttggacagctcccctgcaacctgccacaataacataatgaagcaaacaatggtcgacagctcctgccgaattttgacaagtgatgtgttccaagactgcaacaagctggttgaccctgagccttacttggatgtgtgtatctacgacacatgttcttgtgagtctataggggattgcgcatgcttttgcgatacaatcgccgcttatgcccacgtatgtgcccaacatgggaaggtcgtcacatggaggaccgctaccttgtgcccgcagagttgtgaggaacgcaatctgcgggaaaatggatacgagtgcgaatggagatataattcctgcgctccagcatgtcaggttacatgtcagcaccccgagcctctggcatgtcccgttcaatgtgtggaggggtgtcacgcacactgcccacccgggaaaatactggatgagttgttgcagacctgtgtggacccagaggactgccccgtgtgtgaagtggctggccggagattcgcgtccggtaagaaagtcactctcaatccatccgacccagagcactgccaaatctgtcactgtgacgtagtgaaccttacttgtgaggcctgccaagagcctggcggcctcgtggtgcctccaaccgatgcccccgtgtctccaactaccttgtatgtggaggatatcagcgagccaccactgcacgacttctactgctcccgcctcctcgacctggtgtttctgctggatgggagcagtcggctgtcagaggcagagttcgaggtactgaaggctttcgtggttgacatgatggagcgactgagaatctctcagaagtgggtgcgagtggctgtagtcgagtaccacgatggctcccatgcctacattggcttgaaggaccgcaaacgcccctctgagttgcgccgcattgcctctcaagtcaagtacgcggggtcccaggttgctagtacgagtgaagtattgaagtacaccctttttcagatcttttccaagattgaccgcccggaggcctccagaattacgctgctcctgatggcatcccaagaacctcaaagaatgagtaggaactttgtgagatacgtgcaaggcctgaagaaaaaaaaggtgatcgtgataccagtcggaatcggcccgcacgctaatctgaaacaaattaggctgattgagaaacaagctccagaaaacaaggccttcgtgctgagttcagtggacgaactcgagcaacagcgggatgaaatagtgtcttacctgtgcgaccttgctcccgaagccccgccccctactctccccccagatatggctcaggtgactgtaggccctgggctgctcggcgtgtcaaccttggggcccaagcggaatagtatggtgctcgacgtcgctttcgtactcgaaggctccgataaaataggggaagcagactttaaccgatcaaaggaattcatggaggaggtcattcagagaatggatgtaggccaggactctattcacgtgactgtgttgcagtactcttacatggttaccgtggaatatcccttctctgaagcacagtccaaaggcgacatcttgcagcgggtgagagaaattagataccagggtggcaatagaaccaatactggcctggcacttagatacctcagcgaccactctttcctggtgtcccagggagacagagagcaggcccctaacctcgtgtatatggtgacaggtaaccctgccagcgacgagatcaaaagactccccggggatatacaggtagtaccaataggagtgggcccaaatgctaatgtccaggagctggaacggataggctggcctaacgccccaattctgatccaggactttgagacgctgccccgggaggcccctgatctcgtgttgcagcgctgttgttccggggagggccttcagatccccactctctcccccgcacctgactgtagtcagcccctggacgtgatcctcctgctcgatgggtcttccagcttccccgcctcctatttcgatgaaatgaagtctttcgcaaaagcttttatatctaaagccaacattggccctcggctgacccaagttagcgttctgcagtacggctcaatcacaaccattgacgtgccatggaacgtcgtgcctgaaaaggcgcatctgttgagccttgtagatgtgatgcagcgcgaaggcggccccagtcaaattggcgacgcactggggtttgcggtgaggtatctgacgagcgagatgcacggggcccgccccggagcttctaaagccgtcgtgattctcgttacggacgtgtctgtcgacagcgtggacgctgccgcagacgcggcccggagcaatagggtgaccgtatttcccattgggatcggggaccgctatgatgctgctcagctccgcatattggccggacctgccggagattccaatgtagtgaagctgcagaggattgaggacttgccgactatggtcaccctgggcaactcattcctgcacaagctgtgttcaggattcgtgaggatatgcatggatgaagatggcaatgaaaagaggcccggggacgtctggaccctgcctgatcagtgccataccgtcacctgccagcccgatggacagaccttgctgaagagtcatagagtgaactgcgaccgaggattgaggccctcatgtcccaattctcaaagcccagtcaaagtggaggagacctgtggctgtcgatggacatgtccttgcgtttgtaccggctcatccactagacatatagtgaccttcgatggccagaatttcaaactgaccgggagctgcagctacgtcctgtttcagaacaaggaacaagatctggaagtgattctccataatggtgcatgctctcctggggctaggcagggttgcatgaagagcatcgaggtgaagcactccgccctgtctgtcgaactgcacagcgacatggaggtaacggttaacgggcgcttggtttcagtcccctatgtgggcgggaatatggaggtgaacgtatacggtgccatcatgcacgaagtacgatttaatcatctcggccacatctttacgtttacaccccagaataatgaattccagctgcaactctctccgaagacgtttgcttccaaaacttatggtctgtgcggcatctgtgatgagaacggtgctaacgactttatgctccgggatggaactgtaacaactgactggaaaacactggtacaggaatggactgtacagcgccctggccaaacttgccagcccatcctggaagagcagtgtctggtcccagacagctcacactgtcaggtgctcttgctcccactcttcgccgaatgccacaaggtgcttgcccctgctactttctatgccatttgccaacaagacagctgccaccaggaacaggtgtgcgaagttatcgccagttacgcccacctctgccgcactaacggcgtgtgtgtcgattggcgcactcccgacttttgcgcaatgagctgcccaccctctctggtgtataaccactgcgaacacggatgcccgcggcactgcgatggaaatgtctccagctgcggagatcacccgagtgagggatgcttttgccctcccgataaagtgatgcttgaaggcagctgcgtgcccgaggaagcatgtacacagtgcataggtgaggatggcgtacagcaccagttcctggaagcctgggtccctgaccaccagccatgccagatatgcacatgcttgtccggaaggaaagttaattgtacaactcagccttgccccacggccaaggcaccaacctgcggattgtgcgaagtggcccgccttcggcagaacgccgatcagtgctgcccggagtatgaatgcgtgtgtgatcctgtgtcctgcgacttgcctccggtgcctcactgtgaaaggggcctgcagcccactctgacaaatcccggtgaatgccggcccaacttcacatgcgcctgtagaaaggaagaatgcaagcgcgtgtctcccccctcctgtcctccccaccggcttccgactctgcggaaaacccaatgctgtgatgaatatgagtgtgcctgtaattgtgtcaacagtaccgtgtcatgccccctgggatacctggctagcactgctaccaatgattgcgggtgtactaccaccacgtgcctgcctgataaggtctgcgtgcaccgaagtaccatatatcctgttggccaattctgggaggaagggtgtgacgtgtgcacttgcactgacatggaggacgccgtcatgggcctgagggtggcacagtgctctcagaaaccctgcgaagatagctgtcgatcagggtttacttacgtgctgcacgagggagagtgctgcggacgatgtttgccgagtgcctgtgaggtggtcacgggcagcccgcgaggggattcccagagttcttggaagtccgttggctctcaatgggccagccccgaaaacccgtgcctgatcaatgaatgtgtccgcgtcaaggaggaggtgttcattcagcagcggaacgtgtcatgccctcagttggaggtcccagtttgtccttctggattccagctttcctgtaagacttctgcatgttgtccgagctgtagatgcgagaggatggaggcctgcatgctcaacgggaccgttatcgggccaggtaagaccgtgatgatagatgtctgtacaacctgtaggtgtatggtacaggtaggagtgatcagcggcttcaaactggagtgccgaaaaacaacctgtaacccatgtcccttgggttacaaggaggaaaataatacaggtgagtgttgcggaaggtgcctcccgacagcctgtacgattcagctgcgaggagggcagatcatgacattgaagcgcgatgagaccctccaggatggctgtgacacgcacttttgtaaggtgaatgaacgcggagaatatttctgggaaaagcgagtgaccggatgccctcccttcgacgagcataagtgcctggcggaaggtggcaagatcatgaagatccctggtacctgctgcgacacctgtgaagaaccagaatgtaacgatatcaccgcacgattgcagtacgttaaggtaggaagttgtaaatccgaagtggaggttgacatccactattgccaagggaagtgcgctagtaaggctatgtactctatagacattaacgacgtgcaggaccaatgctcatgttgctcccccacaagaacagaacccatgcaggtggctctgcactgtactaacggctccgtggtctaccacgaagtcctgaatgcaatggagtgcaagtgctcccccaggaaatgctccaag

SEQ ID NO: 21306 - DNA, 8439 bp, synthetic construct
  misc_feature 1..8439: note = source = /note="Description of Artificial Sequence: Synthetic coding sequence"
  source 1..8439: mol_type = other DNA
atgatcccagcccgattcgccggggtgctattggccttggctttgattctgcctggtactctctgtgctgaaggcacccgaggacgcagtagcaccgcccgctgtagtctgtttggtagcgatttcgtaaacaccttcgatgggagcatgtacagtttcgctggttattgctcatacttgctggcgggcgggtgccagaagcgtagtttctccatcattggcgatttccaaaatggcaaacgcgtatcactcagtgtctacctcggcgagttctttgatatccatctcttcgtgaacggcaccgttacacagggcgaccagcgtgttagtatgccttatgcttccaagggattgtacttggagaccgaagctggttactacaagttgtctggagaggcgtatggattcgtggctcggatagacgggtccgggaactttcaggttctgctgagtgaccggtatttcaacaagacctgcgggctttgcggcaactttaatatatttgctgaagatgattttatgacgcaagaaggaacgctgacatcagacccttatgacttcgctaattcctgggccctgagcagtggggagcaatggtgtgaacgggcttccccgcccagtagttcttgcaacatatctagtggagagatgcagaaggggttgtgggagcagtgccagcttctcaaaagcacaagcgttttcgcccgctgtcaccccctggtggatccagagccattcgttgcattatgtgagaagaccctttgcgagtgtgctgggggcttagaatgcgcctgtcctgccttacttgagtatgctcggacctgtgctcaggaaggtatggtcctctacggctggacagatcattctgcatgcagtcccgtgtgccccgcaggcatggagtaccggcagtgtgtgtccccctgtgctagaacatgccagtccctgcacattaacgaaatgtgccaggagcggtgtgtggatggatgcagttgcccagagggtcagctgttggacgagggtctctgtgttgaatcaaccgagtgcccatgtgtccacagcggcaaaaggtatcccccaggaacctccctgagcagggactgcaatacatgcatttgccgcaactcgcagtggatctgctctaacgaagagtgcccaggcgagtgtctagtgacaggtcagtcgcacttcaaatctttcgacaaccgctatttcaccttttcaggaatttgccagtatcttctcgcccgtgactgccaagaccactccttttcaattgtgatcgaaacggttcagtgcgctgacgatcgcgatgctgtgtgcaccaggagcgtgactgttagattgccgggcttgcacaactccctggtaaaactgaagcacggcgcaggcgtcgccatggacggccaggatgttcaactacccttgctgaaaggcgacttgcggattcaacataccgtgaccgccagcgtccgcctaagctacggggaggatctccagatggactgggatggtcgcggtcggctgctcgtcaagcttagtcctgtctacgccggaaagacttgtggcctgtgcggaaattataacgggaatcaaggcgatgacttcctgactcccagcggattagctgagccacgggttgaggattttggaaatgcatggaaactgcatggagactgtcaggatctgcagaaacagcacagcgacccatgcgctctgaatccccgaatgaccagattctcagaagaggcgtgtgcggttcttacttcgcccacctttgaggcctgtcacagagccgtgtccccgctgccctaccttaggaattgccggtatgatgtctgctcgtgctcagatggcagggaatgtctctgcggcgctttggcttcctacgctgcagcttgcgccgggcggggagtccgtgtggcctggagggagccaggacgctgcgagctgaactgccctaaaggtcaggtttatttgcagtgcggaacgccctgcaaccttacctgccgcagccttagctacccggacgaagagtgcaacgaagcttgcctggagggctgcttctgtccaccgggactatatatggatgagagaggagactgtgtgcctaaggctcagtgtccctgttattatgacggagagatttttcaacctgaagatatattctcagatcaccatacaatgtgctattgcgaggacggctttatgcactgtacgatgtcgggcgtgcccggaagcctgctgcccgatgcagtcttgagttcgccgttaagtcatcggtccaagcggtccctctcttgcaggccccctatggtgaaactggtgtgtccggcagacaatctcagggctgaaggcctggagtgtaccaagacatgccagaactatgacctcgagtgtatgtctatgggatgcgtttctggttgcctgtgcccaccaggaatggtgcgccatgagaatcgatgcgtcgctctcgagcgctgcccttgttttcaccagggaaaggagtatgccccgggagaaaccgtcaaaatcgggtgcaacacctgtgtgtgccaggacagaaaatggaattgtacagaccacgtatgtgacgctacttgttccactatcggcatggctcattatttaaccttcgacggcttaaaatacttgttcccaggcgagtgtcagtacgtactggtccaggattattgcggcagcaatcctggaacctttagaatccttgtaggcaacaaaggctgctcccatccttccgtgaagtgtaagaaacgagtcaccattctggtggaagggggtgaaattgagctgttcgatggtgaagtgaatgtgaagcgcccaatgaaagatgagactcattttgaggtggtggagagcgggcggtatattatcctactactaggaaaggccttgagtgtagtgtgggaccgacatttgtcgatttccgtggtgctgaagcagacctaccaggagaaggtttgcggcctttgtgggaattttgacgggatccagaacaacgatctgacttcctccaatcttcaggtggaggaggaccccgtggacttcgggaattcatggaaggtgagctctcaatgtgcggatactcggaaggtgcccctggactcgtccccagctacttgtcacaacaacatcatgaagcagactatggtggactcctcctgtaggatccttacctcggacgtgttccaggattgtaataagcttgtagaccctgaaccctatctggatgtatgtatttatgatacttgttcctgtgagagtatcggagactgcgcttgtttctgtgacaccatcgccgcctatgctcacgtttgtgcccaacatggtaaagtcgtgacttggcggaccgctactctctgcccccagtcatgtgaggagcgtaacctccgagaaaatgggtacgaatgcgaatggagatacaattcgtgtgcaccagcctgccaagtgacctgccaacatccagaacctttggcatgtcccgtccaatgtgttgaggggtgtcacgctcactgtccaccaggaaagatcttggacgaattgctgcagacctgcgtcgaccccgaggactgtcctgtgtgtgaagtggctggcagaagatttgccagcggcaagaaggtcaccctgaaccctagcgatccggaacattgtcagatatgtcattgtgacgtggttaacttaacatgcgaagcatgccaggagccgggaggcctcgttgtgcctcctaccgacgccccggtctctcccacaaccttgtatgtggaagatatctccgagccaccccttcatgatttttactgctctcggctcctggacctcgtgttcctccttgacggaagtagccgcctttcagaagctgagttcgaggtgttgaaagcttttgttgtagatatgatggaacggctgcgcatcagccagaaatgggtgcgagtggcggtagttgagtatcatgacggatctcacgcctatattggacttaaagaccgaaagcgcccgtctgaactgagaaggatcgcctcgcaagttaagtacgctggctcccaggtcgcaagtacttccgaggtcctcaaatacaccttgttccaaatcttttccaagatagatcgaccagaagcttcccgaataaccctgctgctcatggcatcccaagagccccagaggatgagtcgcaacttcgtgagatacgttcagggcctcaaaaagaagaaggttatagtgatccccgttggaataggcccacatgccaatctcaagcagatccgtcttattgagaagcaggctcccgagaataaagcttttgtgttatccagcgtggacgagctggagcagcagagagacgaaatcgtgagctacttgtgtgatttagcacccgaagccccgcctcccacgctgccgcctgatatggcccaagtgactgtgggtcctggtttactcggcgtatcaaccctcggtcctaagaggaactccatggtgctcgatgttgcctttgtcctggaagggtccgataagattggcgaggctgattttaatcgtagtaaagagttcatggaagaagttatccagcggatggatgtgggacaggacagcatacacgtgacggtactgcagtactcttacatggtcaccgtggaatatcctttttcagaagcccagtcaaaaggcgatatacttcaaagggtccgagaaatcaggtatcagggtggaaatagaactaacaccggattggccctaaggtatttgtctgaccattctttcttggtttctcagggcgatagagagcaagcccctaatttggtttatatggtgacaggcaaccctgcctccgacgaaattaagagactgcctggtgacatccaggtggtcccgattggcgtggggccgaatgctaatgttcaggaactcgagcggattggctggcctaatgcccctatcctcattcaggacttcgagaccctcccacgggaagctcctgacctcgtgctccagaggtgttgctccggtgaggggctgcaaatcccaaccttgagcccagcccccgactgtagtcagccactggatgttattctgctgctcgacggctcaagctccttccctgcctcttactttgacgagatgaaaagcttcgccaaagcttttatatctaaggcaaatatcggaccccgattgacacaggtgagcgttctgcagtacggttctataaccactattgatgtgccatggaacgtcgtgcctgagaaagcacaccttctctccctggttgacgtgatgcagcgggagggtggtccgagccagatcggagatgcgcttggcttcgcggttcggtacctcacaagcgaaatgcatggtgcccgaccgggagcgtctaaggctgtggtcatactcgtgacagacgttagcgtggattctgttgacgccgctgccgacgcagcgcgcagtaacagagtgactgtttttcccataggaataggagaccgctatgatgcagcacagctccggatcctggccgggccagcaggagattctaacgtggttaagctgcagagaatcgaggacttgcccaccatggtgaccctgggcaactccttcctgcacaagttgtgctcaggttttgttaggatatgtatggacgaagatgggaacgaaaagaggccaggcgacgtgtggacgctccccgaccagtgccacaccgtgacatgtcaacctgatggccagacattgctcaagtcgcaccgggtgaactgtgacaggggcctgcggccgagctgccctaacagccagtccccggtgaaagtagaggaaacctgcgggtgccggtggacctgcccttgcgtgtgcacgggaagcagtacacggcatatcgtgaccttcgacgggcaaaatttcaagctcacgggtagttgtagttatgtccttttccagaataaggagcaggatctggaggttattttgcacaacggtgcatgtagccctggagcccgtcaaggctgtatgaaatcaatcgaggtgaagcacagcgccctctcggtagagctccactcagacatggaggtgacagtgaatggaaggcttgtgtcagtgccgtatgtcggaggaaacatggaggtgaatgtctatggtgcgatcatgcatgaagtgagatttaaccacctgggccatatcttcaccttcaccccccagaacaacgagttccagctccagctcagcccaaagactttcgcttctaaaacttatgggctgtgcggaatctgcgatgagaatggagctaatgatttcatgcttcgggatggaacagttactactgattggaagaccctggtgcaggaatggacggtgcagaggcctggccagacatgccagcccatcctggaagaacagtgcctggttcctgacagttcccactgtcaagtgttactactgcctttgttcgccgagtgtcataaagtccttgccccggctactttctatgccatttgccagcaagactcctgccaccaggagcaggtgtgcgaagtcatcgccagttacgctcatctctgtcgaacaaacggagtctgcgtggactggcgcacgcccgacttctgcgctatgtcatgtcctccttccttggtatacaaccactgtgaacacgggtgtcctaggcactgtgatggaaatgtgtcttcctgtggtgatcaccccagcgagggctgcttctgtcctcctgacaaggtgatgctagaaggatcttgcgtgcccgaagaagcctgcacgcaatgtatcggggaggacggggtgcagcatcagtttctggaggcctgggtgccagatcaccagccttgtcagatctgtacctgtctctccggtcggaaggtgaactgcaccacacagccttgcccaaccgccaaggctcctacctgtggactgtgtgaggtggccagactgcgccaaaatgctgaccagtgttgtcctgaatatgagtgcgtttgtgaccccgtgagctgcgatctgcccccagtcccacactgcgagcgcggactgcagccaactctgacgaatccaggcgaatgcaggccaaatttcacttgtgcttgtaggaaagaagagtgcaaacgggtatccccacctagttgccctccccatagactgcccactctgcggaaaactcaatgctgtgatgaatacgaatgcgcctgcaactgtgttaacagcactgtatcttgtcccctggggtatttggcctccaccgccaccaacgactgcggttgtacaacaacaacttgcctgccagataaggtgtgtgtccaccggagtactatctatcccgtcggacagttttgggaggagggctgcgacgtgtgcacctgcaccgacatggaggacgcagtgatgggtctcagagtggcgcagtgcagtcagaaaccatgtgaggactcatgccgttccggatttacatatgtgctgcacgagggggaatgttgtggccggtgtcttcccagtgcttgcgaagttgtgaccgggtccccaaggggggacagccagagttcctggaaaagcgttgggtcgcagtgggcatcccccgaaaacccttgccttattaatgagtgtgtacgggttaaggaggaagtgtttattcagcagcgaaacgtatcttgtcctcagttagaggtgccggtttgtcccagtggtttccaactttcttgtaaaacctccgcctgttgccccagctgccgctgtgaacgcatggaagcgtgcatgcttaatggaacggtgattggccccggcaagaccgtcatgattgacgtctgcacaacgtgtcgttgcatggtccaggtgggggttatctcaggcttcaagcttgagtgccgtaagacaacatgtaacccctgtcccctggggtataaggaggagaacaatacaggggaatgttgcgggcgatgtttgccgactgcttgtactattcagcttcgcgggggtcagatcatgaccttgaagagagatgagactcttcaggatgggtgcgacacacacttttgcaaagtgaatgaaaggggcgaatacttttgggaaaagagggtgacagggtgcccaccattcgacgagcacaaatgtctggcggaggggggaaagataatgaagattcccgggacatgctgcgacacatgtgaagagccggagtgtaacgatattacagcgagattgcagtacgttaaggtggggtcgtgcaaatcagaagtggaagtagacatccactattgccaaggaaaatgcgccagtaaagcaatgtactcaatagatatcaatgacgtacaggatcaatgttcctgctgctcacctactcgcacagagccaatgcaggttgccctgcattgcaccaatgggtctgtggtgtatcacgaagtgctgaatgccatggaatgcaagtgcagcccccgcaaatgttcaaag

SEQ ID NO: 21307 - DNA, 8439 bp, synthetic construct
  misc_feature 1..8439: note = source = /note="Description of Artificial Sequence: Synthetic coding sequence"
  source 1..8439: mol_type = other DNA
atgattcccgctcggttcgccggagtgctgctggctttagctctaatcctgcctggcactctctgtgctgaagggacccggggcaggagttcaactgcaagatgcagcctgtttggcagtgatttcgtaaatacctttgatggatcaatgtattcttttgcaggctactgtagctaccttctggctggtggctgccagaagaggagcttttctataatcggtgacttccaaaacggaaagcgcgtgtccttaagcgtgtatctgggtgagtttttcgatatacatctgttcgtcaatggaactgtcacccagggggaccagcgggtatccatgccctacgccagcaaaggactttatttggaaacagaggccggatattataagctctccggggaggcatacggcttcgtagccaggatcgatggaagcgggaacttccaagtgctgctgtccgatagatatttcaacaaaacatgtgggctgtgtggaaactttaacatctttgccgaagacgattttatgacccaggaggggacgttgaccagtgatccttacgacttcgccaattcgtgggcactgtcaagcggggagcaatggtgtgaacgcgcctcgccaccgagttccagttgcaacatcagtagcggcgaaatgcagaagggcctgtgggagcagtgtcagctgctcaaaagtacctcggtgttcgctcgatgtcatcctctggtcgatccagagcctttcgtagctctgtgtgaaaagacactgtgtgaatgcgcgggcggcctggagtgtgcttgcccggctctgctggaatacgcgagaacctgtgctcaagagggcatggtgctctatgggtggactgaccattctgcatgctcacctgtctgtcccgctggtatggagtaccgacagtgcgtgagtccttgtgcccggacttgccagtcgctgcacatcaatgagatgtgtcaagagcgatgtgtggacggctgttcatgcccggaagggcagctcctggacgagggattgtgcgttgaatctacagaatgtccgtgtgtgcattctgggaaaaggtatccgccgggaacttccttatctagagactgtaatacctgcatctgtcggaattctcagtggatctgtagcaacgaagagtgcccaggggagtgtctggtgacaggacagtcacacttcaagtctttcgacaataggtacttcacattttcagggatttgccagtatctactcgcccgagattgtcaggaccattcattttcaatcgtgatcgagactgtacagtgtgctgacgacagggatgccgtgtgcacccgtagtgtcacagtgcgtctgcccggtttgcacaattccctggtcaagctcaaacatggtgctggcgttgcaatggacggacaagatgtccagctcccactccttaaaggggaccttcgcatacagcatactgtcacggcctccgtgagactgagctacggggaagacttgcaaatggattgggacgggcgtggcaggcttcttgtcaaattgtctcctgtgtatgcaggtaagacgtgcggactgtgtggtaattacaatggcaatcagggggacgacttcctgacacccagcggactggcggagccaagagttgaggattttggtaacgcctggaaactgcacggggactgtcaggatcttcagaaacagcactcagatccatgtgcactaaatccccggatgacacgattcagcgaggaggcctgcgcggttctgacgagtccaacgtttgaagcttgccacagagccgttagtccgttgccgtacctgcggaactgtagatacgacgtctgctcctgttccgacggccgcgagtgcctttgtggggccctggcctcttacgccgccgcctgtgccggaaggggcgtgagagtggcctggagggaaccgggcagatgtgaactcaattgtcctaaagggcaggtgtacttacaatgcggaaccccttgcaacctgacttgcagatccttaagttaccccgacgaggaatgtaacgaagcatgcctggagggatgcttctgtccacctggcctttacatggatgagaggggggactgtgtacccaaagcccagtgtccatgctattacgacggggagatatttcaaccagaggatattttttccgaccatcatacaatgtgctactgtgaggacggctttatgcactgtacgatgagcggtgtgccggggtctctgctcccagacgctgtcctttcctcacccctcagtcatagatccaagcgatccttaagctgtcggccgcctatggttaaactggtatgccctgccgataaccttagggctgagggcttggagtgcacaaagacttgccagaactacgacctcgaatgcatgtcaatgggctgcgtgtcagggtgcctttgtccgcccggaatggtacggcacgaaaataggtgcgtggctctggaaagatgcccttgcttccaccagggtaaagagtacgctcccggagagactgtgaagatcggttgtaacacctgcgtatgtcaggatcgcaagtggaattgtaccgatcacgtgtgcgatgcaacttgctctaccattggtatggctcactacctgacgttcgacggactcaagtacctgtttccgggtgagtgtcagtatgtgctggtgcaggactattgcgggagcaatcccggcaccttcagaatccttgtcgggaataaaggctgttctcacccttcagttaagtgcaagaagcgcgtgacaattttggtggagggcggcgagatcgagctttttgatggggaggtaaacgtcaagcggcccatgaaagacgagacccactttgaagtggtggagtctggacgctacatcattctccttttgggtaaagctctgtcagttgtgtgggatcgacatctgagcatcagcgtggtgctgaagcaaacttatcaggaaaaggtgtgcggactgtgtggcaattttgacggaattcagaataatgacctcacgtcttccaacctgcaagtggaggaggaccccgtggactttggcaacagctggaaggtttcaagccagtgcgccgacacacgcaaagtgccgctcgactcttccccagcgacatgccacaacaatatcatgaagcagacaatggtagatagctcctgcagaatccttaccagtgacgtcttccaagactgtaacaagttggtggacccagaaccgtaccttgacgtctgcatttacgatacgtgttcttgcgagagcatcggagactgcgcctgcttctgcgatactatcgccgcctacgctcacgtttgtgcgcagcacggcaaggtggtgacttggcggacagctacgctgtgtcctcagagttgcgaagagcggaacctcagggaaaatgggtatgaatgcgaatggcgttacaactcatgcgcccccgcttgtcaagtcacatgtcaacacccagagcctttagcctgcccagttcagtgtgtggaaggatgtcatgctcactgccctccaggtaagattctggacgaactcctgcagacatgcgtggatccggaggattgccctgtgtgcgaggtggctggacgcaggtttgctagcgggaaaaaggtgaccctgaatccttcagaccctgagcactgtcagatctgtcattgtgatgtggttaatcttacctgcgaagcctgccaggagcctggaggtttagtcgttccaccaacagacgcaccagtctctcccactacgctctatgtggaggacatcagcgaaccccctttacatgacttttactgttcaagacttctagatctcgtgtttcttttagatggttcatctaggctgagcgaggctgagttcgaggtgctgaaggctttcgtcgtggacatgatggagagactgagaatctctcagaaatgggtacgggttgcggtagttgaataccatgatggatcccacgcatacatcgggcttaaagatcgcaaaagacctagcgaattgcgccggatagcgtcgcaggtaaaatacgcaggcagtcaggtggcttccacttccgaggtgctgaaatatactctctttcagatcttctccaaaatcgaccgccccgaggcatcacgaatcactttgctgttaatggcttctcaagaacctcagaggatgtctaggaacttcgtcaggtacgtgcagggccttaagaagaagaaggttattgtgatccctgtaggtatcggtcctcatgctaatctgaaacagatccgcctgatcgagaaacaggctccagagaacaaggccttcgtcctgtctagcgtggacgagctcgaacagcaaagggacgagattgtttcttacctctgtgatttggcacctgaggcacctccacccaccttaccacccgatatggcccaggtaaccgttggcccaggactcctgggagtgagtactctcggccccaagaggaacagcatggtacttgatgtggcctttgtactcgagggctcagacaaaataggggaggcggatttcaatcgctctaaagagttcatggaggaggtgatccagaggatggacgtggggcaggactctattcacgtcaccgtattgcagtattcatacatggtgacggttgagtaccccttcagcgaggcccaatcaaagggggatatcctccaacgggtgcgtgagatacggtatcaaggcggcaatagaaccaacacaggactggccctccggtatttgtcggaccactcttttctggtaagccagggtgatagggagcaagcacctaaccttgtgtacatggtcacagggaatccggcatctgacgaaatcaaacgacttcctggcgacattcaggtggtaccaattggagtcgggcccaacgccaatgtacaggaactggaaaggatcggatggcctaacgcccccattctgatacaggattttgagactctgcccagagaggctcccgatctggttctgcagcgctgctgttctggggagggcctgcagatacctaccctgtcaccggccccagattgctctcagccactggacgtgatactcctcctggatggctctagttcatttccagctagttacttcgatgagatgaagagcttcgcaaaagcctttatcagtaaagccaacatcgggccccgcctgactcaagtttctgttctccagtacggctccatcaccacgattgacgtcccatggaatgtagtgcctgaaaaggcacatctgctgtccctagtagacgtgatgcaacgcgaaggcggaccatcacagatcggggatgcactggggtttgccgttcgctaccttaccagtgagatgcacggcgcacgtcccggagcgagtaaggccgtcgttatccttgtcacggatgtttctgtggacagtgtggacgctgctgccgatgctgcacgcagtaatcgcgtaacggtgttccctatcggcattggagatcgatacgatgccgcccagctgagaattctcgctggaccggctggggattctaacgtcgtaaaactccagcggattgaggatctgcccaccatggtaactttaggcaacagcttcctccacaaactctgctcaggctttgtcagaatatgtatggacgaggacggcaatgagaagcgacctggcgacgtatggacactgccagatcagtgccataccgtcacatgccagccagatgggcagacactgctgaaatctcacagggttaactgcgaccgagggctgcggccatcttgtcccaactcacagtcacccgtcaaagtggaagagacgtgcggatgccgctggacttgcccttgcgtgtgcacagggtcatctacaagacatatagttacattcgacggtcagaattttaaactgacaggtagttgttcatatgtgctgtttcagaacaaggaacaggacctggaggtgatcctgcataatggtgcttgctctccaggggcacgccagggctgtatgaagagcatagaggtgaaacactctgcactgtcagtagagctgcactcggatatggaggtgaccgtcaatggtcgcctggtgtcagtgccctatgtgggcggtaatatggaggtcaacgtttacggtgctatcatgcatgaggttagatttaaccacctcggccatatctttacatttactccccagaataacgagttccagttgcagcttagccccaagacattcgcgtctaaaacatacggcctgtgcggtatttgcgacgaaaatggggcaaatgacttcatgctgcgagacggcaccgtaactacagattggaaaactctcgttcaggaatggaccgtgcagaggcccggacagacctgtcagccaatcctggaggaacagtgcctcgtaccagattcatctcattgccaggtgttgctcctacccctcttcgcagaatgccataaagttctggcaccagctacattttatgccatctgtcagcaggactcttgtcaccaggaacaggtctgcgaagtcattgccagctacgcccacctgtgtcgaaccaacggggtatgcgtggactggcggacccctgacttttgtgctatgtcatgtcctccaagtttggtctacaaccactgcgaacatgggtgtcctaggcactgcgacggcaatgtgagttcctgcggagaccaccccagcgagggctgcttttgcccgccagacaaagtgatgctggagggcagctgcgtgccggaagaggcctgtactcagtgtattggtgaagatggtgtgcaacaccagttcctggaagcctgggtgcctgaccatcagccttgccagatctgtacatgccttagtggccgaaaagtcaactgcacaacccaaccttgtcctaccgcaaaagccccgacctgtggcctgtgcgaagtcgccaggctgcgccagaacgctgatcagtgttgcccagaatatgaatgcgtatgcgaccctgtctcttgcgacctgccccctgtcccccattgtgaaagagggcttcagccgaccctcaccaacccaggggaatgtagaccaaactttacatgtgcgtgccggaaggaagagtgcaaaagagtgagccctccatcctgtccccctcacagattgccgacacttagaaaaacacaatgctgcgatgagtacgagtgcgcatgtaattgcgtgaactccaccgtgagctgtccactcggatatttggcttccaccgccacaaatgactgcgggtgcacaacaacaacctgccttccagataaagtatgtgttcatcgatctacgatctaccctgtggggcagttttgggaggaaggatgcgacgtctgtacttgcactgacatggaggatgcagttatggggttaagagttgctcagtgctcccagaagccctgcgaggactcttgtcgctcaggcttcacatacgttctgcatgagggtgagtgttgtggtaggtgtctccccagcgcttgtgaggtcgtgaccggaagtccaaggggcgactctcaatcctcatggaagtcagtcggcagccagtgggcttcccccgagaatccatgtcttataaacgaatgcgtgcgggtgaaggaggaggtgttcattcaacagaggaatgtgtcctgccctcagctggaggtgcccgtctgcccttcgggattccagttaagctgtaagacaagcgcctgctgtccgagttgcaggtgtgaacggatggaagcatgcatgttgaacggcacagtgattggcccaggtaaaactgtgatgattgatgtatgcaccacatgcagatgcatggttcaggtcggcgtaattagtggattcaaactggaatgcagaaaaacaacctgcaatccttgcccattggggtataaagaagagaacaataccggagagtgctgtgggcggtgcctgccaaccgcttgtaccatccaactccgcggcgggcagatcatgacactcaagagggatgagacactgcaggacggatgcgacacgcacttctgcaaagtgaatgaacgaggggagtacttttgggagaaacgcgtcacaggatgtccacctttcgatgagcacaaatgtctagccgaaggaggcaaaattatgaagattcccggcacatgctgcgacacctgtgaagagcctgaatgtaatgatataaccgcacgattgcagtacgtgaaagtaggatcttgtaagtccgaggtggaagtcgatattcactattgccagggcaagtgcgcttccaaggctatgtactccatcgatataaacgacgtgcaggaccagtgctcgtgctgctctcccacacggaccgagccgatgcaagtggccctacattgtaccaatgggtcagtggtttaccacgaggtcctgaatgctatggaatgtaagtgttcccctcgaaaatgtagtaag

SEQ ID NO: 21308 - DNA, 8439 bp, synthetic construct
  misc_feature 1..8439: note = source = /note="Description of Artificial Sequence: Synthetic coding sequence"
  source 1..8439: mol_type = other DNA
atgataccagcaagattcgcaggagtcttgctggccctagcccttattctacccggtactctgtgcgccgagggaactcgaggacgatcatcgacggctcgatgctctcttttcggatcagactttgttaacacttttgacggttcaatgtattcattcgctggctattgttcatatttgcttgcgggcggttgccaaaagcggtcgttttccattattggagattttcagaacggaaagcgagtatcactctcggtttatttaggcgaattttttgatattcatctgttcgtaaatggaactgtcacccaaggagatcaacgtgtctccatgccctatgcttctaaaggactttaccttgaaacggaagcggggtactacaaattgtcaggtgaagcttacggatttgtcgccaggatagatggttctggtaatttccaggtactcctgtcggatcgatatttcaataagacttgtggactttgtggaaatttcaatatcttcgcagaggatgactttatgactcaagaaggaaccttgacgtccgacccatacgatttcgctaactcttgggcactttcctcaggtgagcaatggtgcgagcgtgccagccctccatccagtagctgcaacatatcatcgggagaaatgcaaaagggactgtgggaacagtgccaacttttgaaatcgacttccgtatttgccagatgtcatccgctggttgatccagagcctttcgtggcgctttgcgaaaaaacactgtgcgaatgtgctggaggcttggaatgcgcgtgccctgccctgctcgagtacgcaagaacgtgcgctcaggagggaatggtattgtacggttggactgatcatagtgcttgctctccagtatgtccggctggaatggaataccgccaatgtgtttcgccgtgcgcacgtacatgccaaagtctccatattaatgagatgtgccaagaacgttgtgtagatggatgctcttgcccagaaggccagctcctcgatgaaggattgtgcgttgagtcgaccgagtgtccatgcgttcattctgggaaacgttacccaccagggacttcgcttagtcgtgactgcaatacgtgtatttgtcgcaatagtcagtggatctgtagcaacgaagaatgcccaggagagtgtttggttactggtcaatctcattttaaatctttcgataaccgttattttactttttcgggaatatgccaatacctcctggcacgtgattgccaagaccattcgttctctatcgtcattgagacagttcagtgcgctgacgatagagatgctgtatgcacacgttcagtgacagtcagacttcccgggctccacaatagccttgtgaagcttaaacatggggcgggtgtcgctatggatggacaagatgtgcaacttccactcctcaaaggagatctacgaattcaacatacagtaacagcctctgtgagacttagctatggagaagatctacaaatggactgggacggtcgtggccgtttgcttgttaagctttctccagtttatgcaggaaaaacatgtggattatgtggaaattacaacggaaaccaaggagacgatttccttacaccatcaggcctggccgaaccacgagtcgaagatttcgggaacgcttggaaacttcatggcgattgtcaagacctccaaaagcaacatagcgatccatgcgcattaaacccgagaatgacccgattttcggaagaggcttgtgcagttttgacatcaccgaccttcgaagcttgccatcgtgcagtatcaccactcccataccttcgaaattgtcgatacgatgtttgcagttgttcggatggccgcgaatgcctctgtggagctcttgcttcgtatgcggctgcttgtgctggccggggagttcgagttgcctggcgagagccaggtagatgcgaacttaattgccccaaaggacaagtctacctccagtgtggaaccccatgtaatctaacttgcagatccctgtcatatccagatgaggagtgcaatgaggcttgcctggagggatgcttttgtccaccaggattgtatatggatgagagaggagactgtgtcccaaaagcgcaatgcccgtgctactacgatggagagatcttccaacccgaagatatattctcggatcatcacacgatgtgctattgtgaagatggattcatgcactgtactatgtctggtgtgcctggatcactcctaccagacgcagttctttcatcgccactatcgcatcgttcaaaacgatccctaagctgcagacctccaatggtcaaacttgtttgtccagctgacaacctgagagctgaaggtttagagtgcacaaagacttgccagaattatgatctcgaatgtatgagtatgggatgtgtatctggatgtctgtgcccgccaggcatggtaagacatgaaaacagatgcgtggcattggagcggtgtccatgttttcaccaaggcaaagaatatgctccaggagaaacagttaaaatcggatgtaacacttgtgtctgccaagatcgcaaatggaattgtaccgaccacgtctgcgacgccacgtgctcaaccattggaatggcacactacctcacttttgacggactcaagtatttattcccaggcgaatgtcaatatgttcttgtacaagattattgcggatcgaatccaggaacatttagaattttggttggaaataaaggatgttctcatccttcagttaaatgtaagaaacgtgttactatcttggttgaaggaggggaaatcgaacttttcgatggagaggtcaatgtcaagagaccaatgaaagatgagactcactttgaagtagtggagtctggacggtatataatcttgcttctagggaaggcactttcagttgtgtgggaccgacacctttcaattagcgttgtgcttaaacagacctatcaagaaaaggtctgtggactgtgtggaaatttcgatggtatccaaaataacgatcttacttcttctaacttacaggtagaagaggacccagtagatttcggtaatagttggaaggtgtcgtcgcagtgtgctgatacaagaaaagtcccattggatagttcgccggctacctgtcataataacattatgaaacagacaatggtggatagctcgtgccgaatcttgacttctgatgtctttcaggattgcaacaaactcgtagatccagagccgtatttggacgtgtgcatctatgacacatgttcctgcgagagtattggtgattgtgcgtgcttctgtgacacaattgcagcctacgctcacgtttgtgcacagcatggaaaggttgtcacatggcgaactgcaactctctgtcctcaaagttgcgaggaacggaatctccgcgaaaacggatatgaatgtgagtggcggtataattcctgtgctccggcgtgtcaagtcacgtgtcaacacccggaaccactagcctgcccagtacaatgtgttgagggatgtcacgcacattgccccccaggtaaaatcctcgacgagcttctacaaacatgcgtcgatccggaagactgcccagtgtgtgaagtagcaggacgaaggttcgcaagtggaaagaaggttacactgaacccatcagatccagaacactgtcagatttgccattgcgatgttgtaaatctcacgtgcgaagcatgccaggaaccaggaggtcttgtcgttcctcccactgatgccccagtgtcaccaacgaccttgtacgtcgaagacatatcagagccaccattgcatgatttctactgttctcgtctactagatttggtcttcctcttggacggaagctcgcgtcttagtgaggctgaattcgaggtcctcaaggcatttgttgtcgatatgatggaaaggttacgaatctcacaaaaatgggttagagttgccgttgttgaataccacgatggatctcacgcttatatcggactcaaagatagaaaacgaccttctgaactgcgtagaatagccagtcaagttaaatatgcaggttcccaggtggcatcgacatcagaagttctaaaatacacattgtttcaaatcttctcaaaaatcgatcgacccgaggcgtcaagaatcacacttttgttgatggcaagtcaagaaccccaaaggatgagtcgtaatttcgttcgttacgtgcaaggactcaagaaaaagaaagtgattgttataccggttggaattggaccacatgcaaatcttaaacaaattcgtttgattgagaaacaggcgcctgaaaataaagcttttgttctctcgtcggttgatgagttggaacagcagcgagatgaaatcgtttcgtacctttgtgacttagccccagaggcaccgccgccgactcttccaccggatatggctcaagttactgttggtcctggactcctgggtgtctctacattgggacccaaacggaattcgatggtgttggatgtggcttttgtcttagaggggtcagataaaattggagaagccgacttcaatagatcgaaagaatttatggaggaggttatccaacgtatggatgttggacaagacagcatccatgttactgtccttcaatattcatacatggtcactgttgagtaccctttctcagaagcccaatcaaaaggagatattctgcagagggttcgcgagatccgataccagggaggtaaccgcactaataccggattagcattaaggtatctaagcgatcattcgtttcttgtttcccaaggagaccgtgaacaagcaccaaatctagtgtatatggttacgggcaacccggctagtgatgaaattaagagactgcctggagatatacaagtggtgccaattggagttggacctaatgccaacgtacaagagttggagcgtattggttggcccaatgccccaatactgattcaagatttcgagactcttcctcgtgaagctccagatctcgttttacaaaggtgctgctcgggtgaaggacttcaaattcctaccctcagcccggcgcccgattgttctcaaccactggacgtaatattactacttgatgggagcagttctttcccagcaagttattttgatgaaatgaaatccttcgctaaagctttcatatcaaaggcgaatatcggaccgcgtttaactcaggtatcagtgctccagtatggatcgattactacgatcgatgtaccatggaacgtcgtccctgaaaaagcccacttgttatcgctagtcgatgttatgcaaagagaaggtggtcctagtcaaataggagatgctcttggattcgcagttcgttacttgacgagcgaaatgcacggagcccgtcccggtgcttccaaagccgtagttattttggtgactgacgtctctgttgattcggtcgatgctgccgcggatgcagcaaggagtaaccgagtgactgtcttccccatagggattggagatcgatatgatgccgctcaactcagaatccttgcaggtccagcaggtgatagtaatgtcgttaaattgcagagaatcgaggatttgccaactatggttacactaggaaacagttttctacacaagctatgttcaggatttgtacgaatttgcatggatgaagacggaaatgaaaaacgtcctggagatgtttggacacttccggatcagtgtcacacagtaacgtgtcaaccagatggtcaaacactactgaaatcgcacagagtcaattgtgaccgcggcttgcgcccgtcatgccctaattcccaatctcctgttaaagtggaagagacatgtggatgtcgctggacttgcccatgtgtgtgcacggggtcgtccacacgacatattgttactttcgacggacaaaatttcaaacttacaggctcatgttcgtacgttctttttcagaataaagagcaggacctcgaggttatattacataatggagcttgttcaccaggtgcccgacaaggatgtatgaaatcaattgaggttaaacattctgctttgtcagtcgaattacactctgatatggaggtcacggttaatgggcggttggtgtcggttccttacgttggggggaacatggaggttaacgtttacggagcgattatgcatgaagttagattcaatcacctgggacacattttcacttttacaccacagaataacgaattccagctccagctctcaccgaagacctttgcttctaaaacgtacggattgtgtggaatttgtgatgagaatggtgccaacgacttcatgctgcgtgatggaaccgtaactacggattggaagacactcgtgcaagagtggactgtacaacgcccgggacaaacctgccaaccgatactcgaggagcaatgcttagttcccgattcaagtcattgtcaagttcttttgttgccactgtttgccgaatgtcacaaagtattggctccagcaacattttatgcaatatgtcagcaagattcatgtcatcaagaacaagtgtgtgaagttattgcttcttacgcccatctttgcaggactaatggagtatgtgttgattggcgtacgccagatttctgtgccatgagttgcccaccgagcttggtgtacaaccattgtgaacatggttgcccacgacactgtgatggtaatgtctcatcatgtggtgatcacccaagcgagggctgtttctgtcctccagataaggttatgctcgaaggaagctgcgtaccagaggaagcttgtactcagtgtattggcgaagatggtgtacaacatcagtttttagaggcatgggttccagatcaccaaccttgtcaaatttgcacttgtctatccggtcgcaaagtaaactgcactacccagccatgcccaacagcaaaggctccaacttgcggactttgcgaagttgcacgactgcgtcagaatgcggatcaatgctgtccggaatatgagtgtgtttgtgatccagtttcctgtgacctgccacctgttccacattgtgaaagaggacttcaacccacacttactaatccgggggagtgccgaccaaactttacttgtgcctgccgtaaagaggaatgtaaaagagtgtctccaccgtcgtgcccgccacatcgattgccgacgttgagaaaaactcaatgttgtgacgaatatgagtgcgcttgtaattgcgtgaactccacggtttcttgtccgctgggttacctggcgtcaactgctactaatgattgtggctgcaccaccactacttgtttaccagataaagtttgcgttcatcgatcgacgatctacccggtcggtcaattctgggaggaaggttgtgacgtctgcacctgtactgatatggaggatgctgtgatgggactccgggtggcacagtgttcgcaaaaaccatgcgaagactcatgtagatcaggatttacttatgtcctgcatgagggcgaatgctgtggaagatgcctgccttccgcctgcgaagttgtgacaggatctcctcgaggggacagtcagagtagctggaaatcggttggcagtcagtgggcttcgcctgagaacccatgtctgattaatgaatgcgttcgggtcaaagaggaggtgttcattcagcaaagaaacgttagctgccctcagttagaagtgccagtgtgtccatcaggattccagttgagttgtaagacgagtgcatgctgcccgtcatgtagatgcgaacggatggaagcatgtatgttaaatggaacagttatcggacctggaaaaacagttatgatcgacgtttgcaccacatgcagatgcatggttcaggttggagtgatctccggatttaagcttgaatgtagaaaaacaacttgcaacccatgtccacttggatataaggaggaaaataatactggcgagtgttgtggaagatgtcttccaactgcttgtacgattcaacttcgaggaggacaaatcatgacactgaaacgtgacgagaccctacaggacggttgcgatacacatttttgcaaagttaatgaacgtggagagtacttctgggagaaaagagtaacaggatgcccaccgtttgatgaacataagtgtctggctgagggaggaaaaattatgaagatcccaggaacatgctgtgacacttgtgaggaaccggaatgtaatgatatcaccgctcgtcttcaatatgtaaaggtaggttcctgcaaatccgaggttgaggtggacatacattactgtcaagggaagtgtgctagcaaggccatgtactccatagacatcaatgacgtccaggatcaatgttcgtgctgttcaccaacacggacagaaccaatgcaagttgctcttcactgtacaaatggatctgtagtataccacgaggttctcaacgccatggaatgcaaatgttcgccccgaaaatgctcaaaa

SEQ ID NO: 21309 - DNA, 8439 bp, synthetic construct
  misc_feature 1..8439: note = source = /note="Description of Artificial Sequence: Synthetic coding sequence"
  source 1..8439: mol_type = other DNA
atgatccctgcccgattcgcaggagttttgttagcactggcactcatcttaccaggtacattatgtgcggaggggacaagaggcaggtcgtcaaccgcccggtgttctctcttcgggagcgacttcgttaatacctttgatggctcaatgtattcttttgccggctattgctcgtatctgctcgcgggcgggtgccagaaaaggtcgttctctattataggggactttcagaacggaaagcgtgtgtccctgagcgtgtatttaggcgagttcttcgatatacacctgtttgtgaacggtaccgtgacgcagggagatcagcgagtatccatgccctacgcctctaaaggactctacctggaaacggaagccggctattataagctttccggcgaagcctatggatttgtggcccgcatagacgggagcggcaacttccaggtgttgctgagcgacaggtactttaataagacatgcgggttgtgcggcaattttaatatttttgccgaagacgatttcatgacacaggaagggaccctgacatccgacccttatgacttcgccaatagctgggccttatcatccggggagcaatggtgcgagagggcgtctcctccatcttcaagctgtaacatttccagcggagagatgcagaagggcctctgggaacaatgtcagcttttgaaatccacaagcgtatttgcacggtgtcatccgctggtggaccctgagcccttcgtggccctgtgcgaaaagacactgtgcgaatgcgctgggggcctcgaatgcgcttgcccggccctgctggagtatgcaaggacttgcgcccaggaaggcatggtactgtacgggtggacggaccacagcgcctgcagcccagtatgtccagcgggcatggaataccgccaatgcgtctcgccttgtgcccgcacgtgccagtcgctgcatataaacgagatgtgccaggagcgctgcgtcgacgggtgcagctgtcctgagggccagctgttggatgagggcctctgtgttgagagcaccgagtgcccctgcgttcacagcggaaaacgatacccgccaggtactagccttagccgcgattgcaatacctgcatctgtagaaacagccaatggatatgtagtaacgaagaatgtccaggtgagtgccttgtgacgggccaaagtcactttaaatcattcgataaccggtatttcactttttcgggcatttgtcagtacctcctggcacgagactgccaggaccatagcttcagcatcgtgattgagacagtacagtgcgccgacgatagagacgccgtgtgtacccgcagtgtgacagtaagacttcccggtttgcataactcattggtaaagctgaagcacggcgccggcgtggcgatggatggtcaagatgtgcagttacctctgttgaagggcgacctccggatccagcacaccgtcaccgcgtcagtgaggctctcttacggagaggacctgcaaatggattgggacgggcgcggcaggctgctcgttaagcttagccccgtgtacgcgggcaaaacgtgtgggctctgcggaaactacaacgggaatcagggagacgacttcttaactccatcaggcctggcagaacctcgggtggaggattttgggaatgcctggaaactgcacggagactgccaggaccttcagaagcaacattccgacccctgtgctctgaatccaagaatgacacggttctccgaggaggcctgtgcggtgctcacatcccctaccttcgaagcctgtcaccgggcagtgagtccgctaccttatttgagaaattgccgatatgatgtgtgctcctgcagcgacggaagagagtgtctctgcggtgcacttgcttcgtatgctgccgcctgtgctggccgcggggtaagggtggcatggagagaacccggcagatgcgaacttaactgcccgaaagggcaggtctatttgcaatgcgggacgccatgcaacttaacatgccgctccttatcatacccggatgaggagtgtaatgaggcgtgcctcgaaggttgtttctgccccccgggcttgtacatggatgaaaggggtgattgcgtccctaaggcccaatgcccatgctattacgacggggagatcttccagcctgaggatatatttagcgatcaccatactatgtgttactgtgaggatggatttatgcattgtacgatgtccggggtgccggggtccctgcttcccgacgctgtcctgtccagtcctctttcacaccggtcgaaacgctctctcagctgtcgccctcccatggtgaaactagtttgccctgctgacaacttgcgtgccgaagggctggagtgcaccaaaacctgtcagaactacgacctcgagtgtatgtccatgggatgtgtcagcggctgcctgtgccccccaggtatggtcaggcacgaaaataggtgcgtcgcactcgagaggtgcccgtgtttccatcagggaaaagagtatgctcccggagagaccgtgaaaattgggtgcaacacctgtgtatgtcaagatcgaaagtggaactgcactgatcatgtgtgtgacgcgacttgctctaccatcggaatggctcactacttgactttcgacggactaaagtatctgtttcctggggagtgtcaatatgtgttagtacaggattattgcggatccaacccagggacttttcggattttggtggggaataaaggatgttcacatccaagcgtcaaatgtaagaagcgtgtaacaatcttggtggaaggaggcgagatcgaattattcgacggagaggttaatgttaaacgccccatgaaagacgagactcactttgaggttgtggagagcggacgctacatcattctgctgttgggcaaggccctgagtgtcgtgtgggatcgccacctgtctatcagtgtggtactgaagcagacctatcaagagaaggtgtgcggcctctgcgggaatttcgacggtatccagaataatgacctcactagctcgaacttgcaagtggaagaggacccagtggacttcggcaattcctggaaagtttcaagccagtgtgcagacacacggaaagtccccctcgactcctctcccgcaacttgtcacaataatataatgaaacaaactatggtggatagctcgtgtcggattttgacatccgacgtcttccaggattgtaataagttggtggatccagagccatacctggacgtttgcatttacgacacctgttcttgcgaatctatcggcgactgcgcctgtttctgtgacactatcgccgcttacgcacacgtctgtgctcagcatggaaaggtcgttacatggcgcactgccaccctgtgccctcagtcttgcgaagagagaaatctcagggagaacggctacgagtgcgaatggcgatataattcctgcgctcctgcttgtcaagtgacatgtcaacatcccgagccgttagcttgtccagtgcagtgtgtggagggctgtcacgctcattgccctcccggcaagatactggacgagttgctacagacctgtgtggaccctgaagactgtcctgtgtgcgaagtggccggacggcgctttgcatcagggaagaaggtaacactgaatccgtccgatcctgagcattgccagatatgccactgcgatgtagtgaacctcacctgtgaagcttgccaggagccaggaggcctggttgtcccacccactgacgctcccgtcagccccacaacgctatatgtggaggacataagcgaaccccccctccatgacttttattgctccaggcttcttgaccttgtgttccttttggacggctccagtcggctctctgaagccgaattcgaagttctaaaggctttcgtcgtggatatgatggagagactgaggattagtcaaaaatgggttagagtagctgtggtcgagtaccatgatggaagccacgcatacatcggattaaaggaccgcaagagaccatcggaactgcgtcgcatagcttctcaagtaaaatacgccggttcccaggtggcctccacaagcgaggtactcaagtacactctcttccagatcttctctaagatagacaggcccgaagcttctagaatcacacttctacttatggcctcgcaagagcctcagaggatgtctcgcaacttcgtcagatacgtgcagggtttaaagaagaaaaaagtgatcgtaatcccggttggtattggaccccacgctaatctgaaacagattcggttaatcgaaaaacaggctccagagaacaaggcgtttgttctgagtagcgttgatgaacttgaacagcagcgcgacgagatcgtttcatatctgtgcgacctggcccccgaagcaccaccgcctaccttaccacccgatatggcccaggtgactgtgggtcccgggctgctaggggtgagtacgttgggccctaagagaaactcaatggtcctggacgtggcatttgtcctcgagggctcagataaaatcggcgaggcagatttcaaccggtccaaggaatttatggaagaagtcatccaaaggatggatgtcggtcaggatagcatccacgtgacagtccttcagtattcctacatggtgacggtggaatatccattcagcgaagcccaatccaagggcgatatcctccagcgggtgcgcgaaatcagatatcagggaggaaatcgcaccaataccggcctggctctacggtacctgagcgatcacagtttccttgtctctcagggcgatcgtgaacaagctcctaaccttgtttatatggttactggcaatcctgcctcggacgagatcaaacgcctgcccggcgacatccaggtggtgcccattggggtcggcccgaatgctaacgtccaagagttagaacgaatcggatggcccaacgccccaattctaatccaggactttgaaacgctcccgagggaggctccagacctggtcttgcagaggtgttgcagcggagaaggcctgcagatccctactttgtcccccgctcccgattgctcacaaccactcgatgtgatactgcttctggatggcagctcgtcattcccagcgtcatattttgatgaaatgaagtctttcgccaaagcgttcatcagtaaagctaatattggccctagactgacccaggtctccgttctccagtacggctcaattaccacgatcgacgtcccctggaatgtggtgccagaaaaggcccacctgctgtcattggttgatgttatgcagcgtgagggcggaccttctcagatcggtgacgccctgggcttcgcagtgcgatatctaactagtgaaatgcacggagccaggccgggggctagcaaggcagttgttatcctggtgactgacgtgtctgtcgattccgtggacgctgctgcagatgccgcgcgcagcaatagagtgaccgtgttccctatcgggataggcgaccgctatgatgccgcccagttaaggatcttggcgggccccgcaggcgatagtaatgttgtcaagttgcaacgaatcgaagatctgcctacaatggtgaccctggggaactctttcctccataagttatgctccggcttcgtgcggatctgcatggatgaggacggtaacgaaaagcgtccgggagacgtatggacactcccagatcagtgtcacaccgtcacttgtcaaccggacggtcagactctgctgaagtcccaccgggttaattgcgatcgaggattgcgacctagctgtccgaatagccagtctcctgttaaagtggaagaaacttgtggttgtcgctggacttgtccgtgcgtgtgcacagggagtagcactcggcatatcgtgacttttgacgggcagaattttaagctcaccgggtcttgctcctacgtactcttccagaacaaggagcaggacctggaggtgatcctccataacggggcctgcagccctggcgctcggcaggggtgcatgaaaagcattgaggtgaagcatagcgccctgtctgtagagctccattcagatatggaggtgacggtgaacgggaggctggtttcagtaccttacgttgggggcaacatggaggtcaatgtttatggcgccataatgcacgaggttagattcaatcatttgggacatatcttcacattcacgccacagaataacgagttccagcttcagctctcgccaaagacattcgcctcaaaaacatacggcctgtgtggcatttgcgacgagaacggggccaatgattttatgctccgcgatggaaccgtgacaactgactggaagacccttgtgcaggaatggactgtccagcgccccggccaaacatgtcagcccatcctggaagagcagtgcctcgtccccgacagttcccactgccaagtgctactgctccctctgtttgccgaatgtcacaaggtcctagctccagctacattttacgccatatgccagcaagattcatgccaccaggagcaagtgtgtgaagtgattgcctcttacgcccacctgtgccgcaccaatggtgtgtgcgttgactggcggacacctgatttctgcgcaatgagctgccccccgagtctggtgtataaccattgcgagcatggatgccctagacattgtgatgggaacgtgagctcctgcggcgaccatccaagtgaggggtgcttctgcccacctgataaggttatgcttgaaggatcctgtgtgccagaagaagcttgcacccaatgtatcggagaggacggcgtccaacaccagtttttagaggcctgggtccctgatcaccagccatgccagatttgcacctgcctgagcggccggaaggtgaattgcaccactcaaccgtgtccaactgctaaagcgcctacttgcgggctgtgcgaagtggctcggttgagacagaacgcagaccagtgctgtcccgaatacgaatgtgtttgcgacccggtatcctgtgatctcccaccggtgccccactgcgagcggggactgcagccgactctcaccaacccaggtgaatgtagaccaaactttacatgcgcatgccggaaggaggaatgtaagagggtgagtcctccctcttgtcccccccacaggctgccaactttgaggaaaacccagtgttgtgatgagtacgaatgcgcctgcaattgcgttaattcaacggtttcctgcccccttggctacctcgcatcgaccgctactaatgactgtggctgcacaacaactacctgcctgcctgataaggtttgcgtgcacaggagtaccatttatcccgttggacagttctgggaagaaggctgtgacgtctgcacctgcactgatatggaggatgcagttatgggactcagagtcgcgcagtgcagccaaaaaccctgtgaggacagttgccgttcagggtttacatacgtccttcatgagggagaatgctgcggccggtgtcttccatcggcttgtgaagtcgtcactggtagcccgcgcggcgactcccagtcctcctggaagtctgtgggatcgcagtgggcaagcccagagaacccctgtctgattaacgagtgcgtcagggtgaaggaggaggtgtttattcaacagaggaatgtcagctgtccacagcttgaggtgcccgtgtgtccttcaggattccagctctcatgcaaaacctcagcgtgctgtccctcgtgtcggtgcgaacgaatggaggcctgcatgctaaacggaacagtgatcggacccgggaagaccgtcatgattgacgtgtgcaccacctgccgctgtatggtgcaggtgggggtaatctctggatttaagttggagtgtcgaaaaaccacatgtaatccgtgtccattgggatataaggaggagaacaacacaggggagtgttgtgggaggtgtctgcccacagcgtgcaccatccagctccgaggcggacagatcatgaccctgaaacgggacgagacgctgcaggacggctgtgacacacatttctgcaaggttaatgagcgaggagaatacttctgggaaaaaagagtaaccggctgtcctccttttgacgaacataagtgcctggccgaggggggaaaaatcatgaaaattccggggacctgttgtgacacctgcgaagaacctgagtgtaatgatataacggccagattgcagtatgtcaaagtgggcagctgtaagagtgaagtcgaggtggacatccattattgccaaggaaaatgcgccagcaaagccatgtactcaatcgatatcaacgacgtccaggaccaatgcagttgttgtagcccaacaagaacagaaccaatgcaagtggcccttcactgcactaacggttccgtcgtgtaccatgaggtgttgaatgcaatggagtgtaagtgttcaccgaggaagtgctccaag

SEQ ID NO: 21310 - DNA, 8439 bp, synthetic construct
  misc_feature 1..8439: note = source = /note="Description of Artificial Sequence: Synthetic coding sequence"
  source 1..8439: mol_type = other DNA
atgatcccagctaggtttgcaggtgtgcttttggcactggccctgattctgcctggtacgctttgtgccgagggaaccagagggcgctcctccacggcccgttgttccctgtttggttcagattttgtgaatactttcgacggctccatgtacagcttcgccggctactgttcatacctcctcgcaggcggctgccagaagcgctctttttcgataataggtgattttcagaacggcaagcgtgtctcactgtcggtgtacctgggagagtttttcgacattcatctgtttgtcaacggaacggtgacccagggagatcaaagggtgagcatgccatatgcaagcaagggcctgtacctggaaaccgaagctgggtactacaaactctcgggagaagcctacggttttgtggcaagaatagatggatcgggaaactttcaagtgctcctttcggaccgctactttaacaagacctgtgggctgtgcggcaactttaacatttttgccgaagatgatttcatgacccaggaaggaactctgacctccgacccatacgattttgcaaacagctgggccctgtcaagcggagaacaatggtgtgaacgcgcatccccgccatcctcctcctgcaacatttcgagtggagagatgcaaaaaggtctgtgggaacagtgtcaactgcttaaatcgaccagcgtttttgcgcgctgtcaccctctggtcgaccccgagccctttgtggccctgtgtgaaaagaccctgtgcgagtgtgcaggtggtctggaatgtgcatgtccagcacttctcgaatacgcaaggacctgcgcacaggagggaatggtgctttacggatggactgatcattccgcgtgtagccccgtgtgtcctgcaggaatggagtacaggcaatgcgtctcgccttgtgcacgcacctgtcaatcgttgcacattaatgagatgtgtcaagaaagatgcgtggacggctgttcatgtccagaaggacagttgctggatgaaggactttgtgtagagagcactgaatgtccttgcgtccactcagggaaacgctatcccccaggtaccagcctctcacgggattgtaacacttgtatctgtaggaattcgcaatggatttgtagcaacgaagaatgtccgggggaatgccttgtgacgggacagtctcatttcaagtcctttgataaccggtactttactttctccggtatatgtcaatacctgcttgcacgcgactgccaggaccacagcttctcaatcgtgattgaaaccgtgcaatgtgcagatgatcgagatgcggtctgcacccgctccgtgaccgtccgtttgcccggactgcataatagcctggtgaagctgaagcacggcgccggtgtcgcgatggatggtcaagacgtgcagcttccactccttaagggcgacctgcgaatccagcatacggtcaccgcgtcggtcagattgtcgtacggtgaagatctccagatggactgggacggacggggcagacttcttgtgaagctctcacctgtctacgcaggcaaaacttgcggactgtgtggtaactacaacggtaaccaaggcgatgattttcttaccccgagcggattggcagaaccgagagtagaagattttggaaacgcatggaaacttcatggggattgtcaagacctccaaaagcaacatagcgatccctgcgcattgaaccctaggatgacccggttttccgaagaagcatgtgcagtccttacctcgccgacctttgaggcatgtcacagagccgtctcaccactcccttacttgaggaattgtcggtacgacgtctgttcttgtagcgatggacgtgaatgtctttgcggagcactggcatcgtacgcagccgcgtgcgcagggcgtggagtgcgggtggcttggcgtgaacccggtaggtgcgaactcaactgtccaaaggggcaagtctacctccagtgtggaactccctgtaatcttacctgtcgttccctcagctaccccgatgaggaatgtaatgaagcctgcctcgaaggatgtttttgtcctccgggactctacatggacgaaaggggtgactgcgtgcctaaggcccagtgtccttgttactacgacggggagattttccaacctgaggacatattctcggatcaccataccatgtgttactgcgaagatggtttcatgcactgcactatgtccggcgtgcccggatccttgctccctgatgcagtgctgtcatcgccactttcacatcggtccaagagatcactgtcgtgtagacccccaatggtgaaactggtgtgcccggctgacaacttgagagcagaagggcttgaatgtaccaaaacctgtcaaaactatgatctcgagtgtatgtccatgggctgtgtcagcggatgcctctgtccaccgggaatggtacgacatgaaaacaggtgcgtcgcactcgagcggtgtccgtgcttccatcaaggtaaggaatacgcacctggcgaaactgtgaagatcgggtgcaacacttgtgtgtgtcaggatcggaagtggaattgcactgaccatgtctgtgacgctacgtgtagcaccattggcatggcacattaccttacctttgacggattgaagtacctcttccccggagagtgtcagtacgtgctggtgcaggactactgtggctcgaatccaggcacttttaggatccttgtgggtaacaagggatgttcgcacccatcggtgaaatgcaagaagcgggtcactatcctcgtcgagggtggagagattgagttgttcgatggagaggtcaatgtcaaacggccaatgaaggatgagactcactttgaagtcgtggagagcggcaggtacattattcttcttcttggtaaagctctctcagtggtttgggacagacaccttagcatctcggtggtgctgaaacagacgtaccaggagaaggtgtgtggactgtgtggaaactttgatggaatccagaataacgatctgacctcatcgaatcttcaagtggaagaggaccctgtcgatttcgggaatagctggaaagtctcatctcagtgcgcggatactcgaaaagtgccattggacagctcgccggccacctgccataacaatatcatgaaacaaaccatggtggactcatcgtgtcgcatccttacgtcagatgtctttcaggattgcaacaaactggtggacccagagccatacctggacgtgtgcatttacgacacctgctcatgtgaatcgattggggactgtgcatgcttttgcgatactatcgccgcgtacgcacacgtgtgtgcacaacacggaaaggttgtgacctggagaaccgcaactctttgtccacagtcctgtgaagaacggaaccttagggaaaacggttacgaatgtgaatggagatacaactcatgcgcacctgcgtgtcaagtgacttgccaacacccagaaccactcgcatgtccagtgcagtgtgtggaaggttgccatgcccattgtccgccaggaaagattctggatgagctccttcagacctgcgtggatccggaggattgtccagtttgtgaagtcgctggcagacggtttgcttcggggaagaaagtaactcttaacccttcagatcctgagcattgtcaaatctgccactgcgacgtggtgaacctgacgtgtgaagcatgtcaggaacccggaggacttgtggtgcccccaactgatgctcccgtatcaccaacgactctgtacgtggaagatatttcggagcctccacttcatgatttctactgttcgaggttgctcgaccttgtgttccttctggatggctcgagccgactgtcagaggcagaattcgaagtgctgaaggctttcgtggtggatatgatggaacgtctgaggatttcgcagaagtgggtcagagtggcagtcgtggaataccacgatggtagccatgcatacatcggcctgaaggatcggaagaggccttcagaacttcgtcggatagcctcgcaagtgaaatacgctggctctcaggtggcatcaacttcggaggtcctcaagtacaccctgttccagatcttttcaaaaatcgacagacccgaagccagccgcataacccttcttcttatggctagccaagagcctcaacgaatgtcgagaaactttgtccgttacgtgcaaggacttaagaaaaagaaagtgattgtgatccctgtaggtatcggtccgcatgcgaatctgaagcaaatcagacttatcgaaaagcaagcccctgaaaacaaagcatttgtgctttcgtccgtggacgaactcgagcaacagcgcgatgaaatcgtctcgtacctgtgcgaccttgcaccggaggcaccacctcccaccttgcctccagacatggcacaagtcaccgtgggacctgggcttttgggggtgtctaccctgggacctaagcgcaattcaatggttctggacgtagcattcgtcttggagggatcagataagattggagaagcagactttaaccggagcaaggaattcatggaagaggtcatccaaaggatggatgtcgggcaggactcaattcatgtcactgtgctccaatactcgtatatggttaccgtggaatacccatttagcgaggcccagagtaagggagatatcctccagagagtgcgagaaattcggtaccaaggtggcaatagaactaacaccggactcgctctccgctacctttccgatcatagcttcttggtgtcgcaaggggatcgcgaacaagctccaaacctggtctacatggttactggtaaccccgcctcagacgagattaagaggctcccgggtgacattcaagtggtgcctattggagtggggcccaacgccaatgtgcaagagctcgaaagaatcggttggccaaatgcacccatactcattcaagacttcgagactctgccaagagaggcgcctgacctcgtgctgcagaggtgttgctcaggggaaggactgcagattcctaccctttcgcccgcacctgattgttcgcaacctctcgatgtcatcctgcttcttgacggttcctcctcgttccccgccagctactttgacgaaatgaaatccttcgccaaagccttcatctcaaaagccaacattggacctcgtctgactcaggtgtctgtgctgcagtacggatccatcactaccattgacgtaccttggaacgtcgtgcctgaaaaagcgcacctgctgtccctggtggatgtgatgcaacgggaaggcggaccttctcaaattggtgacgcactcgggtttgcagtgaggtacctgacctccgaaatgcatggcgctcgacccggcgcttccaaggccgtggtcattctggtgacggacgtgagcgtggattcagtggatgcggccgcagacgcggcaagatcaaacagagtgaccgtgtttccaattgggatcggagatagatacgacgcagcccagctgaggatcctggccgggcccgcaggagattcaaacgttgtaaagctccagcgcatagaagatctgcccactatggtgaccctcgggaattcgttcctccataagctgtgttctgggtttgtgcgtatttgtatggacgaagatggcaatgagaagcgccctggtgatgtctggactttgccagaccagtgccacaccgttacttgtcaacctgatggacaaaccctgcttaagtcccaccgtgttaactgcgatagaggacttcgcccctcatgtccaaatagccaatcaccagtgaaggtggaagaaacttgcggatgtagatggacgtgtccctgtgtgtgtactggatcaagcactagacatatagtcacgttcgatgggcagaatttcaaacttaccggttcgtgttcctacgttttgtttcaaaacaaagaacaagatcttgaagtcattcttcataacggagcgtgctcgcctggagcaagacagggttgtatgaaaagcatagaagtgaagcattcggcactctcagtcgaactgcactccgatatggaggtgactgtgaacgggcggcttgtgtcggtgccctacgttggaggaaacatggaagtgaacgtgtacggtgcaatcatgcatgaagtcagattcaatcatctcggtcatatctttacctttactccgcagaacaacgaatttcagttgcaactttcccccaagacttttgcatcaaagacttacggcctgtgcggtatttgtgacgagaacggagcaaatgatttcatgctgcgagatggtactgtgaccactgactggaaaactctggtgcaagaatggactgtgcaaagacctgggcaaacttgtcagcccattctggaagagcagtgtctggtgccagactcctcgcattgtcaggtgttgcttctccccctcttcgcggaatgtcataaggtgctcgcccctgcaactttctatgcgatttgccaacaagattcgtgtcaccaggaacaagtctgtgaggtcatagcatcctacgcgcacctttgtcgcactaacggtgtgtgcgtggattggcgcacccctgatttttgcgcaatgtcgtgtcctccctcgctggtctataaccactgtgaacatggctgtccacggcattgcgatgggaatgtcagttcgtgcggtgaccatccttcggaaggatgcttttgccctccggataaggtcatgcttgaaggttcgtgtgtcccagaggaagcatgcactcaatgtattggtgaggatggagtacaacatcagtttctggaagcgtgggtgcctgatcaccagccatgtcaaatatgcacttgtctgtccggaagaaaggtgaattgcactacccagccttgccccaccgcaaaggcacctacgtgtggattgtgcgaggtggcgcgactgcggcagaacgcagatcagtgctgtccggaatacgagtgtgtgtgcgatcctgtgtcatgcgaccttccccccgtgcctcattgtgaacgcgggcttcagccgaccctgactaatccaggggagtgtcgacccaactttacctgtgcatgccgcaaggaagaatgtaagcgcgtttcccctcctagctgtcctccacatcgacttcctaccctgagaaaaactcaatgttgcgatgaatatgagtgtgcatgtaattgtgtgaattcaacggtttcgtgtccgcttggatacctggcctccaccgcgacgaatgactgcggctgcaccactaccacgtgtctccctgataaggtgtgcgtgcacaggagcaccatttacccggtcggacaattttgggaagaaggctgtgatgtttgtacttgtactgacatggaagatgccgtgatgggcctgcgggttgcccaatgttcacaaaagccatgcgaggatagctgtcgatccggatttacgtacgtgctccatgagggtgagtgttgtggacggtgtctgccatccgcatgcgaggtggtgaccggatcgccgcggggggattcccagtctagctggaagtcagtcggttcgcagtgggcgtctccagagaatccttgcctgattaacgagtgcgtgcgcgtgaaggaagaagtgtttattcaacaacgaaacgtgagctgcccacaactggaagtgccagtctgtcctagcggcttccagctgtcctgcaagacttcggcttgctgcccgtcgtgcagatgtgaacggatggaagcctgtatgcttaatggaaccgtgattggacctggtaaaaccgtgatgatcgatgtgtgtaccacttgtaggtgtatggtccaagtcggtgtgattagtggttttaagctggaatgccgcaagaccacctgtaatccttgtcctcttggttacaaggaggaaaacaacactggtgaatgttgcggcagatgccttcctaccgcttgtaccatccaactgcgcggcggccagataatgactcttaaacgcgatgaaaccctgcaagatggttgcgatacgcatttttgtaaggtcaacgagagaggtgaatacttttgggagaagagagtcaccgggtgccctccttttgacgagcataagtgccttgccgaaggcggaaagattatgaaaattccaggtacctgttgcgatacttgtgaggagccagaatgcaatgatatcaccgcaagactccaatatgtcaaggtaggatcctgtaagtccgaggttgaggtggatatccattattgtcagggtaagtgcgcatccaaggcaatgtattccattgacattaatgatgtgcaggatcagtgtagctgttgctcacctacccgtactgagcccatgcaagtcgccctccactgcaccaatggatccgtggtgtaccacgaagtgctcaacgccatggagtgtaagtgctccccaagaaagtgcagcaag

SEQ ID NO: 21311 - DNA, 8439 bp, synthetic construct
  misc_feature 1..8439: note = source = /note="Description of Artificial Sequence: Synthetic coding sequence"
  source 1..8439: mol_type = other DNA
atgatccccgccagattcgccggagtgctcctcgcactggctctgattctcccagggaccctgtgcgctgaaggaactcggggacggtcgagcaccgcccggtgtagccttttcggatcggatttcgtcaataccttcgacggaagtatgtactcattcgcaggatactgcagctacctgcttgccggcggttgccagaagcgctcattctccatcatcggagacttccaaaatggaaagagagtgagcctttccgtttacctcggagaattcttcgatatacatctgttcgtgaacggtactgtgacccagggggatcagcgggtgtccatgccgtacgcgagtaagggcctgtacctcgaaacggaagccggatactacaaactgtctggagaagcatacggattcgtcgcgcggatcgatggtagcggaaactttcaggtgctcttgagcgaccggtacttcaacaagacctgtggattgtgcggaaactttaacatattcgccgaggacgatttcatgactcaagaagggaccctgacgagcgatccgtacgatttcgccaatagctgggcactgagctccggagaacaatggtgtgaacgagccagcccgccgagctcgtcgtgcaacatcagctccggcgagatgcagaagggactgtgggaacagtgccaactcttgaagagcactagcgtttttgcgcggtgccatccgcttgtggacccggaaccgttcgtcgccctgtgcgaaaagactctgtgcgaatgcgctggagggctggagtgcgcctgtccggccctgctggagtacgcaagaacttgcgcccaggaagggatggtcctgtatggatggaccgaccacagcgcctgctctccggtgtgtccggcgggtatggaatacagacaatgtgtgtcaccgtgcgctcggacctgtcagtcactgcatatcaatgaaatgtgccaagagagatgcgtggatggatgcagctgccccgaggggcagctccttgacgaaggactgtgcgtggagtccactgaatgcccgtgcgtgcacagtggcaaaaggtatccaccgggaacctccctgtcccgggattgcaatacgtgcatctgcagaaactcccagtggatctgctcgaatgaagaatgcccgggcgagtgcctggtgactggtcagtcccactttaagtcttttgacaaccgctacttcaccttttccggaatctgccaatacctcctggcccgggactgccaggaccattcgttctcaatcgtgattgaaaccgttcagtgcgctgacgaccgggacgccgtgtgcactagaagcgtcactgtccgcctgccgggtctgcataattcgctcgtgaaacttaagcacggagcaggcgtggccatggacggacaagacgtgcagctgcccttgctgaagggcgacctcagaatccagcacaccgtaactgcgtccgtccggttgtcctacggcgaagatctgcaaatggattgggatggtcgcgggagactgttggtgaagctgagcccggtgtacgctggtaagacttgtggcctgtgtggtaactataatggaaaccagggagatgatttcctgaccccgtcgggactcgcggagccgcgcgtggaggacttcggaaacgcatggaaacttcatggggattgccaagaccttcagaagcagcattcagatccgtgtgcgctcaaccctagaatgactcgctttagcgaagaggcatgcgctgtgcttactagcccgactttcgaggcctgtcatagagcagtgtcaccactcccatacctccgtaattgtaggtacgacgtgtgctcgtgttcggacggtcgggaatgtttgtgtggtgctttggcgtcctacgcggccgcctgcgcagggaggggagtgcgcgtggcatggagggaaccaggacgctgcgagctgaactgcccaaaaggacaagtgtacctgcagtgcggaactccttgcaatctcacctgcagatccctctcataccccgacgaagagtgcaacgaggcttgcctcgaaggttgtttctgtcctccggggctctacatggatgagagaggggactgcgtgcccaaggcgcagtgcccgtgctactacgatggagagatctttcagcctgaggacatcttctcggaccaccacaccatgtgctactgtgaggatggattcatgcactgcaccatgagtggagtgccgggatcgctcctgcctgatgctgtcttgtcgtcacctctctcccatcgctccaagcgctccctgtcgtgcagaccccctatggtgaaacttgtgtgcccggccgataaccttagagcggagggacttgaatgcactaaaacgtgccagaattacgacctggagtgcatgtccatgggatgcgttagcggatgtctctgcccacctggtatggtccgacacgaaaaccggtgcgtggccctggaacggtgtccctgctttcatcaaggtaaggagtacgcccctggagagacggtaaagatcggatgcaacacctgcgtttgccaagacagaaagtggaactgtactgaccacgtctgtgacgctacgtgctccactattggaatggcccattacctgactttcgacggcctgaagtacctgttcccgggggaatgccagtatgtgctcgtgcaagactactgtggatcaaatccaggcacttttcgcatcctggtgggaaacaaagggtgttcgcacccgtccgtcaagtgcaagaagagagtcacgatcctcgtggaaggcggcgagatcgaactgttcgacggagaagtcaacgtgaagcgcccgatgaaggatgagactcacttcgaggtcgttgagtccggccgctacatcatcttgctgctgggtaaagccctgtcggtcgtttgggataggcacctctccatctccgtggtgcttaaacaaacttaccaagaaaaggtgtgtggactgtgtggcaacttcgacggcatccagaataacgacctgacgtcatcgaatctgcaggtcgaagaggacccagtcgatttcggaaattcatggaaggtgtccagtcagtgtgctgatacccgcaaagtgccgctcgattcgtcaccggcgacctgccacaacaacattatgaaacaaaccatggtggacagctcgtgtagaatcctgacttcagacgtgttccaagattgcaataaacttgtcgatccggagccttacctcgatgtctgcatctacgacacctgtagctgcgaatccattggtgattgcgcctgtttctgcgataccatcgcagcctacgcccacgtctgtgcgcaacacggcaaggtcgtgacctggcgcaccgccacgctgtgtccgcaatcctgcgaggaacggaacctccgggagaacggatacgaatgtgaatggaggtacaacagctgcgcaccggcctgtcaggtgacctgccagcaccccgagccgcttgcatgccccgtgcagtgtgtggagggatgccacgcccactgcccaccaggaaagatacttgacgaacttctccaaacctgcgtcgacccagaagattgtcctgtgtgcgaggttgccggtcggcgtttcgcgtccgggaagaaggttacccttaacccttcggacccagaacattgtcagatatgccactgcgatgtggtcaacttgacctgcgaagcatgccaggaaccgggaggcctggtcgtacccccaaccgacgcgcctgtctcgccaacgaccctttacgtggaagatatcagcgaaccgcccctccacgatttctattgctcgaggctcctcgacttggtatttctgctggacggatcgagccggttgagcgaggcagaatttgaagtgctcaaggcttttgtcgtggatatgatggaaagactgcggatctcgcagaagtgggtgcgagtcgcggtggtggagtatcatgacggcagccacgcatacatcggactgaaagacaggaaacgtccttcggaattgcggcgcatcgcgtctcaggtgaagtacgcgggctcacaggtcgcctcgacctcggaagtcctgaaatacactctcttccagatcttctccaagatagatcgcccggaggcctcacgcattactctgctgctgatggcatcacaggagccacagagaatgtcacggaactttgtgcgctacgtccaaggtctgaagaagaagaaggtgatcgtgatcccggtgggaattggaccgcacgccaacctgaaacagatcagactgatcgaaaaacaggccccagagaataaggccttcgtgctctcctcggtggacgaattggaacagcaacgcgacgagatcgtgtcgtacctgtgcgacctcgctccagaggccccacccccgactctgccgccggatatggcgcaggtgaccgtgggaccgggcctgcttggcgtgtccaccctgggccctaagcgcaactccatggtgctggacgtcgcctttgtcctcgagggaagcgacaaaatcggcgaagcagactttaaccggtcgaaggaattcatggaggaagtcatccagcgcatggacgtgggacaggactccattcatgtgaccgtgctgcaatacagctacatggtcacggtagagtacccgttctcggaagctcaatcgaagggtgatatcctgcaacgtgtgcgggaaatccggtatcagggaggaaaccgcaccaatactggccttgcgttgaggtatctgtccgatcattcctttctcgtgtcccaaggcgatcgcgaacaagccccaaacctggtgtacatggttactggaaatcctgcttctgatgagatcaagaggctcccaggcgacatccaggtggttccaatcggcgtcggccccaacgcgaatgtccaggagctggagcggatcggatggccgaacgcgccgattctgattcaagattttgaaaccctcccccgcgaggcccctgacctggtgctccagaggtgctgctcgggggagggattgcagataccgacgctgtcgccagctcctgactgctcccagccgttggacgtgatcctgctgttggacggaagctcgagttttccagcctcgtacttcgacgagatgaagagcttcgcgaaggcgttcatcagcaaagcgaacatcggaccacggctcacgcaggtgtcagtcctgcagtacggatcaatcactactatcgacgtgccgtggaatgtcgtgcccgagaaggctcatctgctgtccctcgtggacgttatgcaacgcgaggggggaccctcgcagatcggcgacgctctgggcttcgcggtgagatacctgacctcggagatgcatggcgccagaccgggagcctcgaaggccgtggtcatccttgtcaccgacgtctccgttgactcggtggacgctgctgcggacgccgccaggtcgaaccgcgtgaccgtctttccgatcgggatcggcgatcggtacgatgcggctcaactccgcatcctggctggccctgccggagattcgaatgtggtcaagctgcaacggatcgaagatctgccgactatggtgaccctgggcaactccttcctgcataagctctgttccggtttcgtgcgcatctgcatggacgaggacgggaacgaaaagaggcccggagatgtgtggaccctgccagaccagtgccacactgtaacttgccagcccgatggccagaccctgctgaagtcccaccgcgtgaactgcgatcgagggctccgcccgtcgtgcccgaattcgcagtcgcctgtcaaggtggaagaaacttgcggctgccgctggacgtgtccctgcgtctgcaccggatcctccactaggcacatcgtgaccttcgacggtcaaaacttcaagctgacgggatcctgctcgtacgttctctttcagaataaggagcaggacctggaagtgatcctccataatggtgcctgttcaccaggcgcgagacaaggatgcatgaagtccatcgaagtgaaacactcggcactgtcagtcgagctgcactcagacatggaggtgacggtcaatggcagattggtgtccgtgccgtacgtgggcggcaatatggaggtcaacgtctacggagccattatgcacgaggtgcgcttcaaccacctggggcacattttcacctttacccctcagaataacgagttccaactccagctgagcccaaagacttttgcctcgaaaacctacgggctctgtggcatctgcgacgaaaatggcgccaacgacttcatgctgcgcgatggaactgtgactactgactggaaaacccttgttcaggaatggaccgtgcagcggcccggacagacttgccaacccatcttggaggagcaatgtttggtcccggattcgtcccattgccaagtcctgctgctcccgctgttcgccgaatgtcacaaggtgctggcgcctgccactttttacgcaatctgtcagcaggattcttgccaccaggagcaggtgtgtgaggtaattgcttcctacgcacatctttgcagaaccaatggtgtttgcgtggattggcgcaccccagacttctgcgcaatgagctgcccgccatccctcgtgtacaaccactgcgagcatggatgtccgagacactgcgacgggaacgtgtcaagctgcggagatcaccctagcgaagggtgcttctgtccaccagataaagtgatgcttgagggatcatgtgtcccagaagaagcgtgcactcagtgcatcggtgaggacggtgtgcagcaccagttcctggaggcatgggtccccgaccaccagccttgccaaatctgtacgtgtctgagcggccgcaaagtgaattgtacgacccagccttgcccaaccgccaaggctccgacttgcggtctgtgcgaagtggcacgcctccggcagaacgctgaccaatgctgccctgaatacgagtgcgtgtgcgatccggtgtcgtgcgatctcccgccggtccctcattgcgaaagaggcctccaaccgactcttaccaatccgggcgaatgccggcctaatttcacctgcgcttgccgcaaggaagaatgtaagcgcgtgtcgccaccatcgtgcccaccgcaccgcctgccaaccctcagaaagactcaatgctgcgacgaatacgaatgcgcctgcaactgcgtgaacagcaccgtatcgtgccccttgggctacctggcgagcaccgccactaatgactgcggatgcactaccaccacctgcctgccggataaagtgtgcgtgcatcgctcgacgatttacccggtgggacagttctgggaagaaggctgtgacgtgtgcacctgcactgacatggaggatgctgtcatgggactgcgtgtcgctcagtgctcacaaaaaccatgcgaggactcatgtcgctcgggattcacctatgtgctgcacgagggcgagtgctgtggacggtgcctgccgtctgcgtgcgaagtggtgactggatccccgcgcggcgacagccagtctagctggaagtccgtgggatcacagtgggcgtcgcctgagaatccatgcctcattaacgagtgtgtgcgggtgaaggaagaagtctttattcaacagcgcaacgtgagctgtccacagctggaagtgcctgtgtgcccatccgggttccaactctcatgcaagacttcagcatgctgtccttcttgtcggtgtgagcgcatggaagcctgcatgcttaatgggaccgtgattggcccggggaaaaccgtcatgatcgatgtgtgtaccacctgtcgctgcatggtccaggtcggggtcatcagcggtttcaagctcgagtgtaggaaaactacctgtaacccatgcccactgggatacaaggaagagaacaacaccggggaatgctgcggcaggtgcctgccgactgcatgcaccatccaactcagaggcgggcaaatcatgacgctcaagcgcgacgagactctgcaggacggatgtgacacccatttctgcaaagtgaacgaacgtggtgaatacttctgggagaagcgggtgactggttgtcctccgttcgacgaacacaaatgcttggcggagggagggaagattatgaagatccctggcacttgttgcgacacctgtgaagaaccggaatgtaacgacatcacggctcggctccaatacgtcaaggtgggttcctgcaagagcgaagtggaggttgatatccattactgccagggaaaatgcgcgagtaaagcgatgtattcgatcgacattaacgatgtgcaggaccaatgctcctgctgctcaccaactcggactgaaccaatgcaggtggcattgcattgcaccaacggctcggtcgtgtaccatgaggtgctgaacgccatggaatgtaagtgctcgccaaggaagtgcagcaag

SEQ ID NO: 21312 - DNA, 8439 bp, synthetic construct
  misc_feature 1..8439: note = source = /note="Description of Artificial Sequence: Synthetic coding sequence"
  source 1..8439: mol_type = other DNA
atgattcctgcacggtttgctggcgtcctcctggcactggccctgattctaccaggcaccttatgtgctgaaggaacccggggccgctcctcaaccgctcgctgtagcctcttcggctcagatttcgtcaacacctttgatggaagcatgtattctttcgcgggttattgctcttatctgctagccggaggatgccagaaaagaagtttttccattattggtgatttccagaacggaaaaagggtgagcctcagtgtctatcttggggagttctttgacatccatctgttcgtgaatgggactgtgacccagggcgaccagcgggttagtatgccttatgctagcaagggactgtatctggagacagaagctgggtattacaagctgagtggagaggcatacggttttgtggctagaatagatggttccggcaacttccaggtgctgttgtccgatcggtacttcaataagacatgtggcctctgcggaaattttaacattttcgccgaggatgacttcatgactcaagaaggaacactgacctccgacccgtacgacttcgccaactcatgggcgctgtcatcaggagaacagtggtgtgagagggcttccccccctagctcatcttgtaacatatcctctggggagatgcagaaaggactctgggagcagtgccaattgctgaagtctacctcagtgtttgcacggtgccacccattagtcgacccagagcccttcgttgcgctgtgcgagaagacactgtgtgagtgcgctggtggcttggaatgtgcctgccccgcattgctggaatatgcacggacctgtgcacaggagggcatggtgctgtatgggtggaccgaccattcggcctgcagcccggtatgtccggcagggatggaatacagacagtgcgtttcgccatgtgcgaggacatgccaatcattgcacattaatgagatgtgtcaggaacggtgcgtggatggttgttcctgtcctgaaggccaactgctagacgaaggtctctgcgtggaaagtactgaatgcccctgtgtccattcaggcaagcgatacccgcctggtaccagtctctctcgggattgcaatacatgcatctgtagaaacagccaatggatctgtagtaacgaggagtgtcctggagagtgccttgtgaccggccagtcacacttcaaatctttcgataaccgctattttacctttagtggaatctgccagtatctgctggctagggactgtcaggaccactcattctccatagtgatcgagacagtccaatgtgcagatgatcgcgacgccgtgtgtacaaggtccgtgactgtccgcctgcccggcctgcacaacagtcttgtgaaactgaagcatggtgcaggagttgccatggacggtcaggacgtgcagctgccgctgctcaagggtgaccttagaatccagcatacagtgacagcttccgtgcggttatcatacggtgaggaccttcagatggactgggatgggcggggtcggcttctggtaaaactctcccccgtgtacgctggcaaaacttgcggcttatgtggcaattataatggcaatcagggagatgactttctgactccatctggcctcgccgaaccaagggtggaagactttgggaacgcttggaagcttcatggggactgccaagacctgcaaaagcagcactcggatccgtgcgccctcaacccacgaatgaccagattttcagaggaagcctgtgcagtgctgactagtcctaccttcgaggcgtgtcaccgtgccgtgtcgccacttccgtatctgagaaattgtcggtacgatgtctgttcctgcagtgacgggcgcgaatgtctctgcggcgctctggcctcctatgccgccgcttgcgccgggaggggagttagggtggcatggagagaaccgggaaggtgtgagctcaactgtccaaagggccaggtttatttgcagtgcgggaccccctgcaatctgacatgtcgatctctgtcctatccagatgaggagtgcaatgaggcatgtttggagggttgtttctgtcctccgggtttgtatatggacgagagaggtgattgcgttcctaaggcacaatgcccatgttattatgacggggagatatttcaaccggaagacatcttcagcgaccaccatacgatgtgttactgcgaagacggcttcatgcactgcacaatgtccggcgtacctgggagcttattgccagacgctgtgctgtcctcccctttatcccatcgatccaaaaggagtctgtcctgccgcccgcctatggttaagctggtgtgcccagccgataatttgcgggccgaagggcttgagtgcactaaaacctgtcagaactacgatcttgaatgcatgtccatgggatgtgttagcggctgcctatgcccaccaggaatggtgcgtcacgaaaataggtgcgttgctctggaaaggtgcccttgcttccaccaaggaaaggagtatgcgcctggggaaacggttaagattggttgcaacacatgcgtgtgccaggacaggaaatggaactgtacagatcatgtctgcgatgcaacatgttcgacgatcggaatggcccactatctcacattcgacggcctgaagtacctgtttccaggcgagtgccagtacgtattggttcaggactactgcggctccaacccgggtacttttcgcattctggttggaaataagggctgctcacacccctcagtaaaatgcaagaagcgcgtgaccatcctggttgagggcggcgagattgagctttttgacggtgaggtgaatgtcaagcgccctatgaaagatgagacccactttgaggtggttgagagtggtagatacataatcctccttttagggaaggccctgtcagttgtgtgggatagacacctgtcaatcagtgtggttctaaagcagacttatcaggaaaaggtctgcggactgtgtgggaacttcgacggaatccagaacaacgacctgacgtcaagtaatctgcaggttgaggaggaccctgtggattttgggaattcatggaaggtgtcctctcaatgtgcagacacacgaaaggttcccctcgattcgagcccagccacttgtcataacaacatcatgaagcaaaccatggtggacagctcctgccggatcctgaccagcgacgtgtttcaggattgtaataagcttgtggatcctgagccctacctcgacgtctgtatttacgacacctgctcctgcgaatccatcggcgactgcgcctgcttctgcgacacaatagctgcttacgcccatgtctgtgcccagcacggtaaagtggtaacctggcggactgctactctctgtccccagagctgcgaggaacggaatttaagagaaaacggttacgaatgtgagtggcgctataactcctgtgctcctgcctgtcaggtgacgtgtcagcacccggagccgcttgcttgtcctgtacagtgcgtggagggttgtcacgcgcactgcccgcctggcaagattctggatgaattgcttcagacgtgcgtcgacccagaggattgccctgtatgtgaagtggcgggccgcagatttgccagcggtaaaaaggttactcttaatccctcagatcccgagcattgtcagatctgccactgcgacgtggttaaccttacttgtgaagcatgtcaggagcccggcggccttgtcgtccccccaacggacgcacctgtttcacctaccaccttgtatgtggaggatatttctgagccccccctccacgacttctactgctccagattgctggatctggtctttctgcttgatggatcttcacggctcagtgaggcagagtttgaagtgctgaaggccttcgtggtggacatgatggaaagactgcgcatttcgcagaaatgggtgagagtggccgttgtggaatatcatgacggaagccacgcgtacatcgggcttaaggaccgaaagaggccgtcagaactgcggagaatcgcttcccaggtgaagtatgcagggagccaggttgcctccacctcagaagtgctgaaatacacgttgttccagatttttagtaagatagatcgacccgaggctagtagaataaccttgctacttatggcttcacaggaaccacaacgcatgtcaaggaacttcgtgcgttacgtccaggggctcaagaagaaaaaagtgatcgtgatcccagtggggattggtccacatgctaatcttaagcaaattcggcttatcgagaagcaggctccggaaaataaggccttcgtcctgagttccgttgacgagttagaacagcagagagacgaaatcgtgtcttacctctgtgatctcgccccagaagccccccctcccacgctcccccctgacatggctcaagttactgtcggccccggcctgctgggggtgtcaaccctgggaccaaagagaaattccatggtgttggatgtcgccttcgtcctggagggttcagataagatcggggaagcagacttcaacagatctaaagagttcatggaggaagtgattcaacgaatggatgtgggacaggacagtatacatgtgactgttctgcagtatagttatatggtgaccgtggagtaccccttctctgaggctcagagcaaaggcgatattctccagcgggttagagagatacgttatcagggaggcaatcggactaacacaggcctcgcccttcgttacctgagcgaccactcttttttggtttcacagggcgatcgtgagcaggcccccaatttggtgtacatggtcacaggcaacccagccagtgacgaaattaagcgccttccgggcgatatccaggtggtcccaatcggcgtcggaccgaacgcaaatgtgcaagagctggagagaattgggtggcccaacgcccccatcttgatccaggactttgaaaccttaccgcgagaagctccagacctcgtgctgcagcgttgttgctcaggggaggggcttcaaattcccacgctctcacctgcccccgactgtagtcagccgttggacgtcatcctgctacttgatgggtcgtcttccttccccgcttcatatttcgacgaaatgaaaagcttcgccaaggccttcatctcgaaagcaaacatcggccccagacttacccaagtctctgtactgcagtacgggtcaataaccactattgatgttccgtggaatgtggtgcctgaaaaggctcatcttctgtctctggtagatgttatgcagagggaaggggggccctctcagataggcgacgctttgggatttgctgtgcggtatcttacatctgagatgcacggagcaagacccggcgccagcaaggctgttgtgattttggtgactgatgtgtccgtcgacagcgtggatgccgccgccgacgcggcccgctctaacagagtcacagtgtttcctatcggtatcggggacagatacgacgcagcccagctcaggatccttgcaggtccggccggggactccaatgtggtcaagctccagcggatcgaggatctgccgacgatggtcactcttggaaactcattcctgcacaagctatgttctggctttgtgcggatctgcatggacgaggacggaaatgagaagcggcctggagatgtttggaccctccccgaccaatgccatactgttacatgtcagccagatggtcagacgctgctgaagtctcaccgtgtgaattgtgaccgcggactaagaccatcttgccccaatagtcagtcacccgtcaaagtggaggagacttgtgggtgtagatggacttgcccatgtgtgtgcacgggatcatccacccggcatattgttacatttgatggccaaaacttcaagctcaccggtagctgctcgtacgtgttgttccagaataaggaacaggatctggaggtgattctacataatggtgcctgttccccgggagcccgccagggctgcatgaagagcattgaagtgaagcattccgcattatccgtggagctgcattctgatatggaggtgactgtaaacggacgccttgtttcggtgccttacgttggtggaaacatggaggtgaatgtgtacggagcaatcatgcatgaagtgcgcttcaaccacttagggcacattttcacatttaccccacaaaataatgagttccagctacagttgagcccgaagacatttgctagtaagacatacggcttatgcggaatatgcgatgagaatggagcaaacgatttcatgctcagagacgggacggttaccacagactggaaaaccctagttcaggaatggactgtccagaggcccggccagacctgccagcctatcctggaggagcagtgcctggtgcctgactcaagtcactgtcaagtcctactgttgcccttgttcgcagagtgtcacaaggtactggctcccgccacattttacgccatctgtcagcaggattcctgccatcaggagcaggtgtgcgaagtaattgcctcatatgcccacctttgtagaacgaatggtgtgtgcgtggactggcggactcctgatttctgcgctatgtcctgcccaccctccctagtatacaatcactgcgaacacgggtgtcctcggcactgcgacggcaatgtgtcctcatgcggggaccatccgtctgaaggctgcttctgtccaccggataaggttatgcttgaaggcagttgtgtcccggaagaggcctgtactcagtgtatcggcgaagatggagttcagcatcagtttctggaggcttgggtgccagatcatcagccctgccaaatctgcacctgtctcagcgggagaaaggtaaattgcaccacccaaccttgtcccaccgccaaagccccaacatgtggactctgcgaggtcgcccggttacgacagaatgccgatcagtgttgcccagagtacgaatgtgtatgtgatcccgtgtcatgcgatttaccacccgtcccacactgtgagaggggccttcagcccactttaacgaaccccggtgagtgccggcccaatttcacctgcgcctgccggaaagaggagtgcaagagggtgagtccgcctagctgtccccctcatcggctcccgacgttacgcaagactcagtgctgcgacgagtacgagtgcgcatgcaattgtgtaaattccaccgtcagctgccctctcgggtatcttgctagcactgccacaaatgattgcgggtgcactaccacaacatgccttccagataaagtgtgcgtacaccgatctacaatttacccggtcggccagttctgggaggaaggatgcgacgtctgcacctgcacagatatggaggatgctgttatgggcctgcgtgtcgcccaatgttcccagaagccctgtgaagattcatgccgatctgggtttacgtacgtcctccatgagggagaatgctgtgggcgctgtcttccaagtgcctgtgaagtcgtcacaggatcccctcgcggtgactcccaaagctcatggaagagtgtggggtctcagtgggcttctcccgagaacccatgtctgatcaatgagtgcgtgcgcgtcaaagaggaagtctttatccaacagcgaaatgtctcctgtccccagctagaggtgcccgtgtgtccctctgggtttcagctgtcatgcaaaacgagtgcgtgttgcccgtcctgtcgctgcgagcggatggaggcctgcatgctgaatgggactgtgattggtcctggcaaaacagttatgatcgacgtttgtaccacctgccggtgcatggtgcaggtgggcgtgataagtggattcaaacttgaatgtaggaagactacatgcaacccatgtcccctgggctacaaggaggagaataacacaggggaatgctgcggaaggtgcctgccgacagcttgtacgatccagctgaggggtggtcagattatgacccttaagcgggacgagacactccaggatgggtgtgacacccatttctgtaaggtgaatgaacggggcgaatacttctgggaaaaacgggtgacgggttgtccacctttcgacgaacacaaatgcttggcagaggggggtaagattatgaaaatacctggcacatgctgcgatacgtgcgaggagccggagtgcaatgacattaccgcccgtctacagtacgtgaaggtaggatcctgtaagtcagaggtcgaagtggacatccactattgccaaggcaaatgcgcctctaaggcaatgtattcaatagacattaatgacgtgcaggaccagtgtagctgttgctcccctaccaggaccgagcccatgcaggtggccttgcattgcaccaatgggtcagtagtttaccacgaagtgctcaacgcaatggaatgtaaatgcagcccgcgaaagtgcagcaag

SEQ ID NO: 21313 - DNA, 8439 bp, synthetic construct
  misc_feature 1..8439: note = source = /note="Description of Artificial Sequence: Synthetic coding sequence"
  source 1..8439: mol_type = other DNA
atgatcccagctagatttgcgggcgtgttgctagccctcgccctgatactgccaggaacactttgcgcagagggcaccagaggaaggagctcaactgctaggtgttcactctttggatcagacttcgtgaataccttcgatgggtctatgtattccttcgcgggctattgcagttatctgctggccgggggctgtcaaaagagatccttctcgattatcggtgacttccagaatggaaagagggtctcgttaagcgtgtatctgggggagttttttgacattcatttatttgtgaacgggactgtcacccagggtgaccagagagttagtatgccatatgccagtaaggggctatatctggaaacggaggctggatactataaactaagcggagaagcctatggcttcgtcgccaggatcgatggtagcggcaacttccaggtgctcctcagcgaccgctactttaacaaaacttgcgggctatgcggcaactttaacatctttgccgaagacgattttatgacacaggaaggaaccctgacctctgacccatatgactttgcgaacagctgggctctgagtagcggagagcagtggtgtgaaagggccagtccacccagtagtagctgcaatattagctccggagagatgcagaagggtctgtgggagcaatgccagctactcaaatcgacttccgtattcgccaggtgccaccctttggtggatcccgaaccatttgtggccctgtgcgaaaaaaccctctgcgagtgtgcaggggggctggagtgtgcctgccctgctttgctggagtacgccagaacatgtgcacaagaaggcatggtattgtatggctggactgatcactccgcatgctcgcctgtgtgtcctgctggcatggaataccgacagtgtgtttctccatgcgccaggacctgtcagtccctgcatattaacgagatgtgtcaggagaggtgcgtcgacggctgtagctgtccagaaggacagttgctcgacgagggtctttgcgtagagagtacggagtgtccctgcgtgcattcaggaaagaggtaccctcctggtacaagcctttctcgagactgcaatacctgcatttgtcggaattcgcagtggatttgcagcaacgaagaatgtccaggcgaatgcctggtaacggggcaatctcattttaagtccttcgataatcgatacttcaccttctctggaatctgccagtatcttctagcccgagattgtcaggaccactcattctctattgttattgagactgttcagtgtgccgacgaccgtgacgccgtatgcacaaggtctgttactgtgagactcccgggactgcacaacagcctcgtgaagttaaaacacggcgcaggtgtggccatggacggccaggatgtacagttgcctttgctcaaaggtgatctccgaatccagcatacagtaacagcatcagtacgtctgtcctatggggaggatttgcagatggactgggatggaagaggaagacttcttgtcaagctatcgcctgtgtacgcagggaagacctgcggattatgtggcaactataacgggaatcaaggcgatgacttccttacgccgagcggactcgcagaacctcgagttgaggacttcggcaacgcctggaagctccatggggattgtcaggacctacaaaagcagcattctgatccctgcgccctgaaccctcggatgactaggttttcggaagaagcttgcgccgtactcacatctcctacatttgaagcctgtcacagagctgttagccctctcccctacctgcgaaactgcaggtatgacgtgtgttcctgttccgacggcagggaatgtctctgtggtgctctcgccagctacgctgccgcttgcgctggccgaggggtgcgagtggcttggcgagaacctgggcgatgtgagctgaattgcccaaaaggccaggtatacttacagtgcggtaccccatgcaatcttacatgtcgaagtctttcctatccagacgaggaatgcaacgaggcctgcctggaaggatgtttttgcccccccgggttgtatatggatgagcgaggggattgcgtgcccaaggcacagtgcccctgctactatgacggcgaaatctttcagccagaggacatttttagcgaccaccacacgatgtgctactgcgaagatgggttcatgcattgcaccatgagcggtgtgcccgggtccttgcttcctgatgccgtcctgtctagcccactgtcccacaggtctaagagaagcctgagttgtcgtccaccgatggtgaaactggtttgccctgcagataatctgagagccgagggcctcgagtgcaccaaaacttgccagaattacgatttggagtgcatgagcatgggatgtgtttccgggtgcctctgcccacccggaatggtgcgacacgagaatagatgcgtagcattggagcgatgtccttgcttccatcagggcaaggagtacgcccctggtgagacagtaaagatcggctgcaatacatgcgtgtgccaggataggaaatggaactgcacagaccacgtgtgtgacgctacgtgttcaactatcggaatggcccattacctcacattcgacggactcaagtacctctttcccggcgagtgccaatacgtgctggtccaggattactgtgggtctaaccctggcacattccgtatcttagtgggtaacaagggatgctctcacccttcagtgaagtgcaagaagagagtgacgattctggtggaggggggagagatagagcttttcgatggagaagtgaatgtgaagagacctatgaaggacgagacccatttcgaagtcgtggagtccggcagatacatcatcttgctgctggggaaagctctgtcggtagtctgggatagacacttaagtatctccgtggtactgaaacagacttaccaagagaaagtctgtgggctctgcgggaactttgatggaattcagaacaacgatctgacctccagtaatctgcaggtagaggaagaccctgtcgatttcgggaattcttggaaggtatcttcccagtgcgccgatactcgtaaggtaccactggacagttcacccgcaacttgtcacaacaatattatgaagcagactatggttgatagctcctgcagaatcctaacatcggacgttttccaggattgcaacaagctggtcgatccagaaccctacctcgacgtgtgtatctatgacacatgttcctgcgagtccatcggcgactgtgcttgcttctgtgacaccatagcggcttatgcccacgtttgcgcacaacacgggaaggtagttacctggcgtaccgccaccctgtgtccccagtcctgtgaggaacgtaatctgcgggagaatggatacgaatgcgagtggagatacaatagctgtgcccccgcatgtcaagtgacttgccaacatcccgaacccctggcatgtcctgtgcagtgcgtggaaggttgccacgcgcattgtccccctggaaagatactcgacgaactgttacagacctgtgtcgacccagaagattgcccagtgtgtgaggtggcaggcagacgatttgcgtcaggaaaaaaggttaccttgaatccttctgatccagagcattgtcagatatgtcactgcgacgtcgtgaacctgacttgcgaagcctgccaggagccaggtggcttagtggtcccccctacagacgctcctgtatcccctaccactctgtacgtggaggacattagcgaacctccgctccacgacttctactgcagccgcctcctcgatctcgtatttctgctggacggatcaagtcgactttccgaagccgagtttgaagtgttaaaagcattcgtggtcgacatgatggagaggctccgaatctcccagaagtgggtgagggtcgcggtcgtagagtaccatgatggtagtcatgcttacatcggactgaaggacagaaaaaggccaagcgagctgaggcgtatcgcctcacaggttaaatatgccggtagtcaggtcgcatcgacatccgaagtgcttaaatatacgcttttccagattttctcgaaaatcgataggcccgaggctagccgtataacgttgttgctgatggcgtcacaggagcctcagagaatgtcacgaaacttcgtgcggtatgtccagggccttaaaaagaaaaaggttatcgttattccggtgggcattgggccccatgcaaacctgaagcagatcaggcttattgaaaagcaggcccctgagaacaaggcttttgtgctgtcatccgtcgacgagctggaacagcagagagatgagatcgtcagctacctttgcgacctcgcccccgaagccccgccacccacattgccccccgacatggcccaagtcaccgtgggccccggactgctgggtgtctccactttgggtcccaaaagaaactcgatggtccttgatgtcgctttcgtcctggaaggctctgataaaatcggcgaagctgatttcaaccgcagcaaagagttcatggaagaggtcatccaaaggatggatgtgggtcaggatagcattcacgtcactgtcttgcaatatagttatatggtgactgtagaatacccattttccgaagcacagtcaaagggagacattttacagcgcgtaagagagatccgttaccagggcgggaaccggaccaacactggactggccctacggtacctgagcgaccacagcttcttggtctctcagggggacagagaacaagcgcctaatttggtgtatatggtgacgggcaacccagcctcggacgaaatcaagcggctcccaggggacattcaagtggttcctataggcgtgggcccaaatgccaatgtacaggagctcgaaagaataggatggccgaatgctccaattctcatccaagactttgagactctgccccgagaggcaccagatctggtcctacagcgatgctgctcaggagaggggctccagatcccgaccctgagtcccgcgccagactgtagccagccccttgacgtgattcttctgctggatgggagctcctcatttcctgcatcttactttgacgagatgaagtcatttgcgaaggcctttatatccaaggccaacattggccctcgtctgacccaggtgagtgtgctgcagtatggcagcatcaccaccatcgatgtgccctggaatgtggtaccggagaaagcacatctgttgtccctggttgatgttatgcagagagaggggggaccctcccagatcggcgacgctctgggctttgctgtccgctaccttacttctgaaatgcatggtgcgaggcctggcgccagcaaagcagttgtgatcctagtcaccgacgtatctgtggatagcgttgatgccgcagcagacgccgcccgttcaaatagggtgactgtcttccccatagggataggggacagatacgacgcagcccagctgaggatactggccggccctgccggcgatagtaacgttgtgaagctgcaacgcatcgaggatctaccgaccatggtgactctcggcaactcgtttctccacaagctgtgttccggcttcgtcagaatctgcatggatgaagacggaaacgaaaagcgacccggcgacgtttggactctgcccgaccagtgccacactgttacttgtcagcctgacggccagacattgcttaagtctcatagagttaattgtgacagaggcctgagacctagctgtccaaatagtcagagtcctgtgaaagtggaagaaacttgtggttgccgttggacgtgcccttgcgtttgtacaggttcttctacacggcacattgtaacgttcgacggccagaatttcaaacttacgggcagctgtagctatgtgctgttccagaacaaagaacaggacctagaggtgatcctccataacggcgcatgcagtcctggcgctagacagggatgtatgaagtccatcgaggttaagcactccgccctgtcagtcgagctccactctgacatggaggtcaccgtcaacggacggctcgtatctgtgccctacgtgggaggtaatatggaggtgaacgtctacggtgcgatcatgcacgaggtgaggttcaaccatttgggtcatatctttacattcacaccccaaaataacgagtttcaactgcaattgagccccaaaaccttcgcatcgaagacctatggactgtgtggaatatgcgacgaaaatggggccaacgacttcatgttacgagatggaactgtgacgacagattggaagacgttagtgcaagagtggactgtgcagcgacctggccaaacctgccagcccattctcgaggagcagtgtctggtgcctgattcttctcattgtcaggtgctgctactgccactcttcgctgagtgccacaaagtgcttgcacctgcaacattctatgctatctgtcaacaagattcgtgccaccaggaacaggtctgcgaggtgatcgccagctacgcgcacttatgcaggacaaatggcgtgtgtgttgactggcgtactccggatttctgcgcaatgtcttgtcctccgtcccttgtctacaatcactgcgaacacggttgccccagacactgtgacggcaatgtgtctagctgtggtgaccacccatccgagggctgtttttgtccacctgacaaggtgatgttggaaggctcttgcgttccagaagaggcctgtacacagtgtattggggaagatggggtgcagcaccaatttctggaggcttgggtcccagaccaccagccctgtcagatctgtacctgcctcagtggtcgaaaagtgaattgtaccacgcagccgtgcccaacggcaaaggcccccacgtgcggcctttgtgaagtggccagactgaggcagaacgccgaccagtgctgcccggaatacgagtgcgtttgcgatccagtgagttgtgatctgccccctgttccccactgcgaaaggggacttcaacctacattaacaaaccccggcgagtgccgacctaatttcacatgcgcctgccgaaaggaggagtgcaagcgcgtcagtccaccgtcctgcccacctcaccgccttcccaccctccgaaagactcaatgctgcgatgagtacgaatgtgcgtgtaattgtgttaacagcacagtgagttgtccgcttgggtatcttgcctctaccgctaccaatgattgcggctgtacaaccacaacctgtctcccagacaaggtgtgcgtccacagaagtacgatctacccagttggacaattctgggaggaaggctgcgacgtctgcacctgcacagacatggaggacgctgtcatgggcttgagggtggcccagtgctcgcagaagccttgcgaggactcctgccgtagcggattcacatatgttctgcatgaaggcgaatgctgcgggaggtgcctcccttcagcatgtgaagttgttacggggagtcccagaggagacagtcagagcagctggaagtcagtaggtagccagtgggccagcccggagaacccttgcctcataaatgagtgcgtgcgagtcaaggaagaggtgtttatccagcagagaaacgtgagttgtccccagctggaggtgcccgtctgtccctctggtttccagctttcctgtaagacttcagcatgttgtccttcctgccgctgcgaaagaatggaggcctgtatgctgaacggtaccgtaatcggccccggtaagactgttatgatcgatgtttgcactacctgtcgatgcatggttcaagtgggcgtgatttccggctttaagttggaatgcaggaagacgacttgtaacccatgcccacttggctacaaagaggagaacaatactggagagtgttgcggcagatgcctgcctacggcatgtaccattcagctacgaggaggccagattatgaccctgaaacgagatgagacactgcaagatggctgcgacactcatttctgtaaggtgaacgagcgaggcgagtacttttgggagaaaagagttacaggctgcccccctttcgatgagcataagtgcctggcggagggaggaaagatcatgaaaattcccggcacctgttgcgacacatgtgaagagccggagtgtaatgatatcaccgctagactgcagtacgtgaaagtcggttcctgtaaatcggaggttgaagtggacatccattactgccaaggcaagtgcgcatctaaagccatgtatagcattgacatcaatgatgttcaggatcaatgttcttgttgcagccccacgaggaccgaacccatgcaggtggcattacattgcaccaatggtagtgtggtgtaccatgaggttttgaatgctatggagtgcaaatgttcacctaggaagtgtagcaaa

SEQ ID NO: 21314 - DNA, 8439 bp, synthetic construct
  misc_feature 1..8439: note = source = /note="Description of Artificial Sequence: Synthetic coding sequence"
  source 1..8439: mol_type = other DNA
atgattcctgcccgttttgcgggtgtgctgcttgctctggcccttatactgcctggcacactgtgtgcggaaggcacccggggcaggtcatctacagctcgatgctctttgtttggctctgattttgttaacacatttgatggctccatgtactccttcgcgggctactgctcatacttgcttgccgggggatgccagaagcgttcctttagtatcataggcgattttcagaacggcaaacgggttagcttgagtgtttatctgggggagttcttcgatatccacctgttcgtgaacggcaccgtgacccaaggcgaccagagggtgtccatgccctacgcctccaaaggtctgtacctagaaacggaggctggatattataagcttagcggagaggcctacggctttgtggcccggatcgacggatctggaaacttccaggtgctcctgtccgacagatattttaacaaaacatgcggtctctgcggtaactttaacatcttcgccgaagatgatttcatgacccaggaagggacccttacttcagacccttacgacttcgcaaattcatgggcactgtcttccggtgaacaatggtgcgaacgcgcctcaccccccagttcctcatgcaacatctctagcggagagatgcagaagggactgtgggagcagtgccaactgctcaaatctacaagtgtgttcgctaggtgtcatcctcttgtggacccagaaccatttgtggccttatgtgagaagactctttgcgagtgcgccgggggcctggagtgtgcatgcccagccctgctcgagtatgccagaacttgtgcccaagaaggaatggttctctatggatggactgaccattctgcctgcagccccgtgtgcccagccggcatggagtatcgccaatgtgttagcccttgcgcgcgaacctgtcagtccctacacattaatgaaatgtgccaggaacgttgcgtcgatggatgcagctgccccgaaggccagttacttgacgaaggcctgtgtgtggagtcaacggagtgcccatgcgtgcactctgggaagcgttatccccccgggacttctctatcccgtgattgcaatacctgcatttgtcggaactctcagtggatctgctctaatgaagaatgccctggcgaatgcctggtcactggccagagtcacttcaaatcttttgataatcggtacttcacgttttctggcatctgccagtacctcctagcgcgggattgccaggatcacagtttttccatcgtaatagagacagtgcagtgtgcggatgacagggatgctgtttgtacccgctctgtgacggtccggctcccagggctgcacaattcacttgtcaagcttaagcatggggcaggggttgccatggatggccaggatgtccagctgccccttctgaagggagatttgagaatacagcacacagttacggcatctgtacgcctgagctacggagaagatctgcagatggactgggacggccgcgggaggctcctcgttaaattaagcccggtgtacgctggaaagacctgtggactgtgtggaaattataatggaaatcagggcgacgactttttgacaccatccggattggccgagccacgggttgaagatttcgggaacgcttggaaacttcacggcgattgccaagacctgcagaagcaacacagcgatccctgcgcactaaacccaaggatgaccaggttcagcgaggaggcttgtgcagtgcttacgagtcctactttcgaggcttgccaccgtgcggtgagtcctctgccgtacctgcggaattgtcgatacgatgtgtgttcatgttcagatggacgggagtgcctgtgtggcgctctcgcatcatatgctgctgcatgtgccggtagaggcgttcgcgtcgcttggagggaaccaggccggtgtgaactcaattgccccaagggacaggtatacctgcaatgcggcacaccatgcaacctcacctgtaggagccttagctacccagatgaggagtgcaacgaggcatgtttggagggctgtttttgtccgcctggtttgtatatggacgaacggggtgactgcgtgccaaaggcacagtgtccgtgctattatgacggagagatttttcagcccgaggacatttttagtgaccaccataccatgtgttattgtgaggatggctttatgcattgtactatgtctggtgtaccaggaagcctgctgcccgacgcagtactaagctcaccccttagccaccggagtaagaggtcgctgtcctgcaggcctcctatggtcaagttggtgtgccccgcagacaatctgagggcggaagggctggaatgtactaagacctgtcagaactacgacctggagtgcatgtctatgggatgtgttagcgggtgtctgtgccctccggggatggtacggcacgagaatcggtgcgtcgcattagagagatgcccatgtttccatcagggcaaggagtatgcaccaggcgaaaccgtaaaaatcgggtgtaacacgtgcgtgtgtcaggatagaaagtggaactgtacggatcatgtttgcgacgcaacctgcagtaccataggaatggctcattacttaactttcgatggtctcaagtacttgttccctggtgagtgtcagtacgtactggtccaggattactgcggatccaatcccgggactttccgcatcctcgtggggaacaagggctgctcacatccctcggtgaagtgtaaaaagcgcgttacaatcctggtggaggggggtgagattgaattatttgacggagaagttaatgtgaagagacctatgaaggatgagactcatttcgaggtggtggagtccggacgctacatcattttgctactgggaaaagccctgtcggtggtgtgggaccggcacctcagcatatcggtcgtcctgaaacagacctatcaggagaaggtgtgcggcctctgcggtaattttgatggaattcaaaacaacgatcttacttcatctaatctgcaagttgaggaggatccagtggactttgggaattcctggaaggtgtccagccaatgtgctgatacccggaaggtaccactggacagttctccggctacgtgccataataacatcatgaaacagaccatggttgattccagctgcaggatcctgacatcagacgtcttccaggattgcaacaaacttgtggatcctgaaccttacttggatgtatgtatctatgacacttgtagctgcgagagcattggtgactgcgcctgcttctgcgatacaattgctgcctatgcccatgtgtgtgctcagcatggcaaagtggtgacctggagaacagcaacactatgtcctcaatcctgtgaggaaagaaacctgcgtgagaatggatatgagtgtgagtggcgttataacagctgtgctccagcatgccaagtgacgtgccaacacccagagccacttgcatgccctgtgcagtgtgttgaaggctgccacgcccattgtccacctgggaaaatcctggacgagctgctgcagacatgcgtggaccccgaggattgcccagtgtgcgaagtcgccggccgacggtttgcctctggcaagaaagtgactctgaacccatcagatccagaacattgtcagatttgccattgcgacgtggttaatctgacttgtgaggcctgccaggagcccgggggattagtcgtccctccgacagatgccccagtttctccaacaaccctttacgtcgaggacatctcagagccccccctgcacgacttttattgctctcggctgctcgatctcgttttcttactggatgggtctagcagattatccgaggctgaattcgaggtgctcaaagccttcgtcgtcgatatgatggagcgcctgcggataagccaaaagtgggtgcgggtcgccgtggtggagtatcatgacgggagccacgcatatataggacttaaggatagaaagcggccatctgagctgcgccgtatcgcctctcaggtgaagtacgcgggatcccaagtggccagcactagtgaggttctcaagtatacccttttccagattttcagcaaaatagataggccggaagcttctagaatcaccctgttgctgatggccagtcaggaaccacagagaatgagcagaaattttgtccggtatgtgcaaggcctgaaaaagaaaaaggtaattgtgatcccggtgggcatcgggcctcacgccaatcttaaacagatcagacttattgaaaagcaagcgccagagaacaaggcttttgttctgtcgtccgtggacgaattagaacagcagagggatgagattgtgtcatatctctgtgacctcgccccagaggcacccccaccgactctcccgccagacatggcacaggtgaccgtgggacctgggttgctgggggtatccaccctgggaccaaaaagaaacagcatggtgctggacgtagctttcgtcttagaaggctctgataagatcggcgaagcggatttcaaccgatccaaggagtttatggaggaggtgatccagcggatggatgtaggacaggattccatccacgtgaccgttctccagtatagctatatggtaaccgtggaataccccttcagcgaggcgcagtccaagggcgacatcctgcaaagggtgagggaaatacgatatcagggcggtaacaggactaacacaggtttggctctcaggtatttgagcgaccatagtttcttggtgtctcagggtgatcgagagcaggctccaaacctcgtgtacatggtgacgggtaatcctgcttccgacgagatcaagcgactgcctggcgatatccaggtggtaccaatcggggtaggcccgaacgcaaacgtgcaggagctagagagaatcgggtggcccaatgcacctattctcattcaggatttcgagaccctcccaagagaggcccctgacttggtactccagaggtgttgctcaggtgaaggtttacagatccccacactgagccccgcaccggactgctcacaaccactggacgtgatattattattagacggcagcagcagcttcccggcctcttatttcgacgaaatgaagtcctttgcaaaagcttttataagtaaagccaatatcgggcctagactgacacaggtgtcagtgctgcaatatggctccattaccacgattgatgtgccttggaacgtggtgcccgaaaaggcgcatctgctgtcccttgtcgacgttatgcagcgggagggaggccccagtcagatcggagacgccctggggttcgctgtgcgatatttgacttccgagatgcacggcgcacgcccaggagcatccaaagcggtggttattcttgtgacagacgtgagcgtggattcagtggatgccgcagccgatgcagctcgatcaaaccgtgtgaccgtattcccgatcggaataggcgatagatacgacgcggcccagctccggattctggccggcccagcgggagacagcaacgtcgtcaagctgcaacggattgaagatctccccacaatggttactttaggaaatagttttctacacaagctctgcagcgggtttgtacgaatttgcatggacgaagatgggaatgaaaagagacctggcgatgtgtggacactgcctgatcaatgccacactgtgacctgccaaccggatggacagacactcttgaagtcacatagagtcaactgtgaccgcggcctgcgtccgagctgtcctaactcccagtctcccgtgaaggtggaagagacttgtggttgccgctggacatgtccatgcgtttgcactgggagctcgaccaggcatatcgtgacgttcgatggccaaaactttaaattgaccggctcctgtagctatgttttgttccagaacaaagagcaggatcttgaggtgatactccacaacggagcttgttcaccgggcgctcgacaagggtgtatgaaaagcattgaggtgaaacacagtgctctgagcgtagagctacactcggacatggaggtaactgtgaacggacggcttgtgtctgtcccatacgtcgggggaaacatggaggtgaacgtttatggtgctatcatgcacgaggtaagattcaaccacctcggtcatattttcacttttacaccgcagaacaacgagtttcagctccagttgagcccaaagactttcgcatccaagacatatgggctctgtggaatctgtgatgagaatggagcgaacgactttatgctccgggatggaaccgtaaccacggactggaaaaccctggtgcaggaatggactgtgcagagaccgggccaaacctgccaacctatccttgaagaacaatgcctcgtgccagattctagccactgtcaggtgctgctgcttcccctgtttgcagaatgtcacaaggtgcttgctccggccaccttctatgccatttgtcagcaagacagttgccaccaagagcaggtgtgtgaagtgatcgcctcttatgcgcatctgtgtcgcaccaatggggtatgtgtcgattggcgcacaccggacttttgtgccatgagttgtcctccgtcactggtctataaccactgtgaacatggttgcccgcgccactgcgacggcaacgtctcatcttgcggagaccatccgtccgaaggctgtttctgtccgcccgacaaagttatgcttgagggtagctgtgtgcccgaggaggcatgcacccaatgcatcggtgaggacggcgtgcagcatcaattcctggaagcttgggtgcccgatcaccagccctgccaaatctgtacatgtctcagcggtcggaaagtgaactgtactacacagccttgcccaacagcaaaagctcccacatgtggcctgtgcgaagtggcccggctccgccagaatgccgatcagtgttgccctgagtacgagtgtgtctgcgatcccgtgagttgtgacttaccgccagttcctcactgtgaacgtggccttcaacctacactgacaaatccaggtgaatgtcgtccgaatttcacctgcgcatgtaggaaagaagagtgcaagcgggtctcccccccctcatgtcctcctcatcgcttacccaccctgcgcaaaacacaatgctgcgatgaatacgagtgcgcttgcaactgcgtgaactcgactgtctcgtgtccccttggatatctggccagcactgcaactaacgactgtggttgcacaacaacaacatgtctacctgacaaggtttgcgtccatcgaagtaccatctaccctgtcggacagttttgggaagagggctgtgacgtatgtacctgcactgacatggaagacgctgtcatgggactccgcgttgcccagtgtagccaaaagccctgcgaagactcctgcaggagcgggtttacatatgtgctgcatgagggggagtgctgcggtagatgcctgccttctgcctgtgaagtggttactggtagtccccgtggcgactctcagagcagctggaagtccgtgggctcccagtgggcctctcctgaaaacccttgtctgattaatgaatgtgtgcgtgtgaaggaggaggtctttattcagcaacgaaatgtgtcttgcccacagttagaagtgcctgtgtgcccatcggggtttcagctgagttgcaagacttcggcttgttgtcccagctgccgctgtgagaggatggaagcgtgcatgttgaatgggacggtaattgggcctggcaagacagttatgattgatgtgtgtactacctgtcggtgcatggtgcaggtgggtgtgatttccgggtttaaactggagtgcaggaaaactacctgcaacccttgcccactggggtataaagaagaaaacaacacgggcgagtgctgtgggcgatgcttgcccacggcttgtactattcagcttaggggaggacagataatgactctaaagcgggatgagactctgcaagatggctgtgatacccacttctgcaaagtgaacgaaagaggcgagtatttctgggagaagcgagtcaccggctgtcctcctttcgatgagcacaagtgcctcgctgaggggggtaagataatgaaaatcccggggacttgctgtgatacatgcgaagaacccgaatgcaatgatataactgccagacttcaatatgtgaaagtcggcagctgtaagtccgaggtagaagtggatattcattactgccagggcaaatgcgcatctaaggccatgtacagtatcgatattaatgacgtgcaggaccaatgctcttgctgttcgcctacacgaacagagcctatgcaagtcgctctgcattgtacaaatgggagtgtggtttaccacgaggtacttaatgccatggaatgtaagtgcagccctcgcaagtgttctaag

SEQ ID NO: 21315 - DNA, 8439 bp, synthetic construct
  misc_feature 1..8439: note = source = /note="Description of Artificial Sequence: Synthetic coding sequence"
  source 1..8439: mol_type = other DNA
atgatacctgcacggttcgcgggagtgctgctggctctggcgttgatcctgccgggcaccctttgtgccgaagggacccgcggacgctcctcgaccgcgaggtgctcccttttcggatcagatttcgtgaatactttcgacggtagcatgtactccttcgctggctactgctcatacctgctcgcgggcggttgccagaagaggtcgttctcaatcatcggggacttccagaacggtaaacgcgtgagcctgtcagtttaccttggcgagttcttcgacattcatctcttcgtgaatggaaccgtgacccaaggcgaccaaagggtttccatgccttacgcctctaagggcctgtatctggagactgaggccggctactacaaactctccggcgaggcctacggtttcgtagcgcgcattgatggatcaggtaacttccaggtgctgctgtccgatagatacttcaataagacgtgcggactctgcgggaactttaacatctttgcggaggacgacttcatgactcaggaaggcaccctgacttcggacccgtacgactttgccaatagctgggccctgtccagcggagaacaatggtgtgagcgggcctcgccgccttcctcctcatgcaacatttccagcggagagatgcagaagggactgtgggagcagtgtcagctgctgaagtccacttccgttttcgcccgctgtcaccctctggtagaccctgaacctttcgtggctctgtgcgaaaagacgctctgtgagtgcgccggcggactggaatgtgcatgtccggctctgctggaatacgcccggacttgcgcccaggagggcatggtgctgtacggttggacggatcattcagcgtgtagcccggtttgtcctgcggggatggagtatcgccaatgcgtctccccgtgcgcgcggacctgccaaagcctgcacatcaatgagatgtgccaggagcggtgcgtcgacggatgctcgtgccctgaaggacagctgctggatgagggactctgcgtcgagtcgactgaatgcccgtgcgtccactcgggaaaaagatacccgccgggaacctcactctcgcgcgattgtaacacttgcatctgtcggaactcacagtggatctgcagtaacgaagaatgtccaggcgaatgcctcgtcaccggccagtcgcacttcaagagctttgacaaccgctactttactttctcagggatctgtcaatacctgctggcgagagattgccaggaccatagtttctcgatcgtgatcgagactgtccagtgcgccgacgaccgggatgccgtgtgcactcggtccgtgactgtgaggctgccgggactgcataactccctcgtgaagttgaagcacggcgccggggtggcgatggacggacaggatgtgcagcttcccctgctgaagggagacttgagaattcagcacactgtgactgcatccgtgcgcctgtcgtacggcgaagatctccagatggactgggatggacgcggccgcctgctcgtgaaactttcaccagtctatgctggaaagacttgcggactgtgtggaaactacaacggaaaccaaggcgacgactttttgactccgtctggactggctgagccacgggtggaagatttcggaaatgcctggaagttgcacggagactgtcaggacctccaaaagcagcacagcgatccctgcgctctcaaccctcgcatgactaggttttcggaagaggcgtgcgccgtgttgacctccccgaccttcgaagcctgccaccgcgcagtgtcgccgctcccttaccttaggaactgcagatacgacgtgtgctcgtgctcggacggacgagagtgcctgtgtggggcgctcgcatcatacgcggcggcgtgcgccggtcggggtgtgagagttgcatggcgcgagccgggccggtgtgagctcaattgcccgaagggacaggtctacctccagtgcgggactccctgtaacctcacctgcagaagcctttcgtaccctgatgaggaatgcaatgaagcctgcctggagggatgcttctgccccccgggcctctacatggatgagcgcggggactgcgtgccaaaggcgcagtgcccttgctactacgacggcgagattttccagccagaggacatcttctccgatcatcataccatgtgctactgcgaagatggtttcatgcattgtaccatgtcgggagtccccggatcgctgttgccggatgcggtcctgtcgtcgccattgtcgcaccggtctaagcgctccctctcctgcaggccacctatggtcaaactggtctgcccagctgataacctcagggccgaagggctcgagtgcactaaaacctgccaaaactacgatttggagtgtatgtctatgggatgcgtgtccggttgcctgtgcccgcccggaatggtgcgacatgagaaccggtgcgtggcactggaaaggtgcccttgctttcaccaaggcaaagaatacgccccgggagaaactgtgaaaatcggctgtaacacgtgcgtgtgccaggatagaaaatggaactgcaccgaccacgtgtgtgacgcgacctgcagcaccatcggaatggcgcattacctgactttcgacggactcaagtacttgttcccgggagaatgccagtatgtgctcgtccaggattactgtggatccaacccaggaacctttcggatcctcgtcggtaataagggctgttcccacccctctgtcaagtgcaaaaaacgggtcaccatcctggtggagggcggtgaaatcgagctctttgacggcgaagtcaacgtgaagcgccctatgaaggacgaaactcattttgaggtggtcgaaagcggtagatatatcatcctgctcctcgggaaagcgctgagcgtggtctgggacagacacctttcgatcagcgtggtgcttaagcaaacttaccaagagaaagtctgtggtctttgcggtaacttcgacggcatccagaataatgacctcacttccagcaacctgcaggtggaggaggacccggtggactttggcaatagttggaaagtgtcgagccagtgtgccgacactcggaaggtccctttggattcatcgcccgctacctgccacaacaatatcatgaagcagaccatggtggattcgagctgcaggatcctcacttcggatgtgtttcaggattgtaacaagctggttgatcctgagccgtaccttgacgtctgcatttacgatacctgttcgtgcgaatcgatcggagactgcgcttgcttctgcgataccatcgcagcttacgcccacgtctgtgcgcaacatggaaaggtggtgacctggagaaccgcgactctttgcccacagagctgcgaggaacggaatctgcgcgagaacggatacgaatgtgaatggcgctacaacagctgcgcaccggcctgtcaagtgacgtgccagcacccggagcccctcgcctgcccggtgcagtgtgtggaaggatgccatgcccattgccctccagggaagatcctcgacgagctcctccagacgtgcgtggacccggaagattgccctgtgtgcgaggtggcgggccggcgcttcgcctcagggaagaaggtgaccttgaatccatcggacccagagcattgccagatttgccattgcgacgtcgtgaacctgacttgtgaggcgtgccaggagccgggagggctcgtggtgcctcccactgatgcaccggtgtcccccactactctgtacgttgaagatatctcggagccaccgctgcatgacttctactgctcgcgtctgcttgacttggtgttcctgctggacggctcctcacggctgtcagaggcggagtttgaagttctcaaggcattcgtggtggacatgatggaacgcctgaggatctcccaaaagtgggtgcgggtggcggtggtggaataccacgacggatcgcatgcctacatcggcctcaaggatagaaaaagaccctccgagctccggcggatcgcatcccaggtgaagtacgccggaagccaggtggcctcaacctccgaagtgctgaagtacaccctgttccagatcttcagcaagatcgacagaccggaggcctcaagaatcaccctgctgctgatggcgtcccaggaacctcagcggatgtcgcgcaacttcgtccgctacgtgcagggcctcaagaaaaagaaggtcatcgtgatcccggtcggaatcgggccgcacgcaaatctgaagcagatccggctcatcgaaaagcaggccccagaaaacaaagcgtttgtgttgtcatccgttgacgaactggaacaacagcgcgacgagatcgtgagctatctctgcgatctggcacctgaggcaccgcccccaactctcccgcccgatatggctcaggtcaccgtgggtccaggcctcctgggcgtctccaccctgggcccgaagcgcaactccatggtgctggatgtggcgttcgtgctcgagggctctgacaagatcggggaagctgactttaatcgttcgaaggagtttatggaagaagtgatccagaggatggacgtgggtcaggactccatccacgtgaccgtcctgcaatactcgtacatggttacggtggaataccctttctccgaggcccagagcaagggggatatcctccagcgcgtgagagaaatccggtaccagggaggaaacaggaccaacaccggccttgcactgcgctacctctccgatcactcgttcttggtgagccagggtgaccgggagcaggcaccgaacctggtatacatggtgaccggtaacccagcatccgacgaaatcaagaggctgccaggggatatccaggtggtgccgattggagtgggaccgaacgccaacgtccaggagctggagagaatcggctggccaaacgccccgatcttgatccaggacttcgaaactctgccgcgggaagccccggacctggtgctgcagaggtgctgctcaggtgaaggacttcagatcccaacgttgtccccagcccctgattgtagccagccccttgacgtcattttgttgctcgacggatcctcatccttcccggctagctacttcgacgagatgaagtcttttgcaaaggcattcatctccaaagccaacatcgggccaagattgacccaagtctcagtcctccaatacggatcaatcacgaccatcgacgtcccatggaatgttgttcctgaaaaggcgcacctcctgtccctggttgatgtgatgcaaagagagggaggtccatcccagatcggagatgcactgggattcgccgtgcggtacctgacgtcggaaatgcacggtgcgcgcccaggggcctccaaagcggtcgtgatcctggtcaccgatgtgtcggtggactcagtggacgcggcggcagacgcagcccgctcaaaccgggtcaccgtgttccctattggaatcggagacagatacgatgctgcccaactcagaatcctcgccggacctgccggagatagcaacgtcgtgaaattgcaaaggatcgaagatctgccaaccatggttaccctcggcaacagcttcctccacaaactctgcagcggatttgtgcggatctgcatggacgaagatggaaatgagaaaagacccggggacgtctggaccctgccggatcagtgccatactgtcacttgccaaccggatggacaaactctcctgaagtcgcatagagtgaattgcgatcgggggctccgcccatcgtgtcctaactcacagtcgccggtgaaggtggaggaaacctgtggctgccggtggacttgcccatgcgtctgcactggatcttcgactaggcacattgtgactttcgatggacaaaacttcaagttgaccggttcgtgcagttacgtgctgttccagaacaaggagcaggacctggaggtgatcctccacaatggcgcttgctctccgggagcccggcagggctgtatgaagagcatcgaggtgaagcattccgctttgtcggttgaactgcatagcgacatggaggtcactgtgaatggaagattggtatctgtgccttatgtgggcggcaatatggaagtgaatgtctacggagcgatcatgcacgaagtcagattcaatcacctcggtcatatctttacgtttacgccgcaaaacaacgagttccaactccaactcagcccgaaaactttcgcctcgaaaacttacggtctgtgtggtatctgcgacgaaaatggtgctaacgactttatgctgagggacggaactgtgacgacggactggaaaacgctcgtgcaagagtggacggtgcagcgccccggacagacttgtcagccgattcttgaggagcaatgcctcgtgccagattcttcgcattgccaagtgctcttgctgccgctgttcgcagaatgccataaagtactggccccagcaaccttctatgccatttgccaacaggactcatgccaccaagaacaggtctgcgaggtgatcgcgtcttatgcccatctctgtcgcacgaatggcgtgtgcgtggactggagaacccccgacttctgcgcgatgtcatgcccgccgtcgctggtgtataatcactgcgaacatggatgtccgagacattgtgacgggaacgtgagctcatgcggcgaccacccgtcagaaggatgcttctgtcctcctgacaaagtgatgctggaagggtcctgcgtgccggaagaagcatgcactcagtgcatcggagaggacggagtgcaacatcaattcttggaagcatgggtgccggaccaccaaccgtgtcagatctgtacctgtctgtccggaagaaaagtgaactgcaccactcagccttgtccaaccgccaaggccccaacctgtggtttgtgcgaagtggcgcggctgcggcaaaacgcagatcagtgctgcccagaatacgagtgtgtgtgcgatcctgtgtcctgtgaccttccaccggtgcctcactgtgaacgcggactccagccgactctgactaaccccggagaatgccgaccgaactttacctgcgcttgccgcaaggaagagtgcaagcgcgtctcgccaccttcctgccctccacaccggctgccgaccctgcggaaaacgcaatgttgtgacgaatatgagtgtgcatgcaattgcgtcaatagcactgtctcctgcccgctgggatacctggcttcgactgccaccaacgactgcggctgtaccaccactacttgcctgccggataaagtctgcgtgcaccggtcgaccatctatccggtgggtcagttctgggaagagggatgtgatgtgtgtacctgcaccgacatggaagatgcagtgatgggactgcgcgtcgcccaatgctcccagaagccatgcgaggactcctgcaggtcgggatttacttacgtgttgcacgagggagaatgctgcggccggtgcctgccctcggcctgcgaagtcgtgaccggttcgccgcgcggtgactcgcaatcctcttggaagtcagtcgggtcacagtgggcctccccggagaacccgtgcctcatcaatgagtgcgtccgggtgaaggaagaagtgtttatccaacagcgcaatgtctcgtgtcctcagctcgaggtgccggtgtgcccgtcaggattccagctctcgtgcaagacttccgcgtgttgcccgtcgtgccgatgtgaacgcatggaagcctgcatgctcaatggcacggtgatcgggccaggtaagactgtcatgatcgatgtgtgcactacctgccgctgcatggtgcaggtcggtgttatctccggattcaaactcgaatgccgaaaaaccacctgtaatccttgtccgttgggatacaaggaagaaaacaacactggtgaatgttgtggcagatgcctcccgaccgcttgcaccatccagctgcggggagggcagatcatgaccctcaaacgggacgaaactctgcaggatgggtgcgacactcacttttgtaaggtgaatgagaggggagagtacttctgggaaaaaagagtgactgggtgtccgccgttcgacgaacacaagtgcctcgctgagggcggaaaaatcatgaaaatccccggaacttgttgcgacacctgtgaagaacccgagtgtaacgacatcactgcgcggcttcaatacgtgaaggtgggctcctgcaagtccgaggtggaagtggacattcactattgccaaggcaaatgcgcctcgaaagctatgtactccatcgacatcaacgatgtccaggaccagtgttcgtgctgctcaccaacccggaccgaacctatgcaggtggctctgcactgcaccaatggctccgtggtgtaccacgaagtgctcaacgcgatggagtgtaagtgctccccgcgcaagtgttctaaa

SEQ ID NO: 21316 - DNA, 8439 bp, synthetic construct
  misc_feature 1..8439: note = source = /note="Description of Artificial Sequence: Synthetic coding sequence"
  source 1..8439: mol_type = other DNA
atgattccggccaggttcgccggggtcctgctagccctcgctctaatcttaccgggaacgctgtgtgcagaagggacgcgaggccgctcgtcaacagcccggtgtagcttgtttggatccgactttgtaaatacattcgatgggagtatgtatagttttgcagggtactgcagctacctactggcaggagggtgtcagaaacgatccttctccataattggagacttccagaatggcaaacgggttagcctcagtgtgtatttaggcgagttttttgacatacacctgtttgttaatggcaccgtgacacaaggggaccagcgcgtgtcgatgccctatgccagcaagggactatatttggagaccgaggccggctactacaagctgtcgggtgaagcctacggtttcgtggcgagaatcgacggctctggcaacttccaggtgctgctcagcgacagatacttcaacaagacctgtggattgtgtggcaactttaatatcttcgctgaagatgactttatgactcaggagggtaccctcacgtccgatccatacgactttgcaaattcatgggctcttagctctggtgagcaatggtgcgagagggcctcacccccaagtagttcatgtaatatttcatccggggagatgcagaaaggactttgggagcagtgccagctacttaaaagcactagtgtgttcgccagatgccacccccttgtagatcccgagccattcgtggctttgtgcgagaaaacgctatgcgagtgtgcaggcggtctagagtgcgcctgtcctgccttgctggaatacgctcggacctgcgcacaggaaggcatggtgctgtacggctggactgatcacagcgcatgctcacctgtgtgccccgccggaatggaataccgtcagtgcgtgagcccatgcgcgcgtacatgccaatctcttcatattaacgaaatgtgccaggaaaggtgtgttgacggatgctcttgccctgaagggcagctcctcgatgagggcttgtgtgtcgaaagtactgaatgtccatgtgtgcattcaggtaagcgctatcccccaggaacatccctatccagagattgtaacacttgcatttgccggaacagtcaatggatctgctctaacgaggaatgcccgggggagtgtctggtgactggacagtcacatttcaagagtttcgataacaggtattttaccttctcaggcatttgccagtacctgctcgctagggactgccaggaccacagcttcagcattgtaatcgagactgttcaatgtgcagacgatagggacgccgtttgtacgagatccgtcaccgttagattgcctggtcttcacaactccctggtgaaattgaaacacggagccggggttgctatggatgggcaagatgtgcaactgccgttgctaaaaggggacttgaggatccagcatacagtaactgcctcagtacgtctgagttacggagaggatctccagatggactgggacggccgaggaaggctactggtgaagctttccccggtgtacgctgggaaaacttgcgggctctgcggtaattataatggcaaccagggtgacgacttcttgaccccatcagggttagctgaacctagagtagaagattttggtaacgcatggaagctgcacggcgactgtcaagatctgcagaaacaacattcagatccatgcgcactaaatccgagaatgacaaggtttagcgaggaagcttgtgccgtgctcacaagtcctacttttgaagcgtgccaccgagccgtttcgcccttgccatacctacggaactgtcgttatgacgtctgtagctgtagcgacgggagggaatgcctgtgcggcgcactggcctcttatgccgcagcctgcgctggtcggggggtgcgcgttgcttggcgtgaacccggaaggtgcgaactgaattgtcctaagggccaggtatacctgcagtgtgggaccccatgtaatctgacgtgccgctcattatcctacccagacgaggagtgcaacgaggcctgcctggaaggttgtttttgtccacctggtctgtatatggacgaaagaggagattgcgtgcctaaggcccaatgcccgtgctattacgacggcgaaattttccagccagaggatatcttttctgatcaccataccatgtgctactgcgaggatggattcatgcactgcactatgagtggagtccctggatctctactccctgatgcagtcctgagctctcctctgagccatcgttccaagaggagtttgagctgtcgcccgcctatggtgaagctcgtctgccccgccgataacttacgtgccgaagggctggagtgtacaaagacttgtcaaaactatgatctggagtgtatgagcatggggtgcgtttcggggtgcctgtgccctcccggaatggtgagacatgagaaccgctgcgtcgccctggagagatgtccttgtttccaccagggcaaagagtacgcaccgggcgagaccgtcaaaatcgggtgcaatacatgcgtttgccaggatcgcaagtggaactgtaccgatcacgtgtgtgacgctacctgttcaactatcggtatggctcattacctgacatttgatgggctgaaatatctttttccaggcgaatgccagtacgtactcgtgcaagactactgcgggtccaaccctgggactttcaggattctggtcggaaataagggctgcagccacccttcggtgaagtgcaaaaagcgggtgactatactcgttgagggtggtgaaattgaactgttcgacggtgaagttaatgtgaaaagacccatgaaagatgagactcattttgaggtcgtcgaatccggccggtacattatcctgctgctgggaaaggcgctgagcgttgtctgggaccgtcatctgagtatctctgtggtgctgaaacaaacatatcaagaaaaagtttgcgggctttgcggcaatttcgacggaatacagaacaacgacctgacttcttctaatttgcaagtggaagaagatcccgtcgattttggaaacagctggaaagtcagctcgcagtgtgccgacacccggaaggttccactagattcgagcccagcaacctgccataacaatatcatgaagcagacaatggtggactccagttgtcggattctgacaagtgatgtctttcaggactgtaataaacttgtagatcctgaaccctacttggacgtctgtatatacgatacttgtagttgcgaaagcattggcgattgtgcttgcttttgtgatacaatcgccgcttatgctcacgtgtgtgcacagcacggaaaggtcgtgacctggcgcaccgccacactgtgcccgcaatcgtgtgaggagagaaacctgcgcgagaatggatacgaatgcgaatggcgttacaattcttgtgcgcccgcctgtcaggtaacctgccagcaccccgaacctctggcctgtccagtgcaatgcgttgaagggtgccatgcccactgtccgcctggtaaaatcctggacgagctgctgcaaacgtgtgtggacccagaagattgccccgtgtgcgaggtggccgggcgacgcttcgctagcgggaagaaggtgaccctgaatccgagtgatcccgaacattgccagatttgccattgcgatgtggtgaacctgacctgtgaggcttgtcaggaaccgggtggacttgtggttccaccaacagacgcgcctgtgtcaccaactacactatatgtagaggatatctccgagcctcccctccacgacttttactgtagtaggctgctcgatctggtctttctactggatggttcctctcggctgtctgaagccgaatttgaagtactgaaagccttcgttgttgacatgatggagcgcctccgaatttcccaaaagtgggtgagggtggccgtggtcgagtatcatgacggctcccacgcttatatagggctgaaagatagaaaaaggcctagcgagctgcggcgtatagcaagtcaggtcaaatacgccgggtcccaagtggcttcgacaagcgaggtgctcaagtacacactttttcagatcttcagcaaaatcgacaggcctgaagccagcagaattacgcttctgctgatggcaagtcaggagccgcaacgaatgtctcggaattttgtccgctatgtgcagggactgaagaagaaaaaagtgatagtgattcccgttgggatcggcccgcatgcgaacctcaagcaaatccgattaatagagaaacaggcccctgagaacaaagcttttgtgttgagctctgtggacgagttggaacagcagagagacgagattgtaagctacctttgcgatctggctccagaagccccaccgccgacactgccgcctgatatggcacaggtcacagtaggacctgggctgctgggagttagtactttgggtccgaagcggaactccatggttctggacgtggcctttgtcctcgaaggcagtgacaagataggcgaggctgacttcaaccggtcaaaggaattcatggaggaggtgattcagcgtatggacgtgggccaggactccattcacgtcacagtcctgcagtacagttacatggtaacagtcgaatacccattctctgaggcccagtcaaaaggcgacatcctgcagcgtgtccgggaaatcagataccaagggggcaatcgtacaaatacgggcctcgcactgcgatatctgagtgaccatagcttcctggtgagccagggggatagggaacaagcccccaacctcgtgtacatggtaactggaaatccggccagcgatgaaatcaagagactgcccggagatatacaagtcgtccctatcggagttgggccgaatgctaatgtgcaggaattggaacggatcggatggcctaacgctccaattttaatccaggacttcgaaacattgccgcgcgaagcacccgatttagtgctacagcgatgttgttctggagagggactgcagattcctaccctgtctccagctcctgactgctcccagcccctcgatgtgatactcctgctggatggttcctcatcctttcctgcaagctatttcgatgagatgaaatccttcgccaaggcattcatctcaaaagcgaacatcggccctaggctaacccaggtgagcgttctccagtacgggagcattacaacaatcgacgttccctggaatgttgtacccgagaaggctcatctgctgtccctcgtggatgtcatgcagcgggagggtggacccagccaaatcggagacgccttgggctttgccgtcagatacttgactagcgaaatgcatggcgccaggcctggagcctcgaaggccgtagtgattctggtcacggatgtgtctgtggatagcgtggacgcggctgctgacgctgcccgctccaatagagttaccgtgtttcccatcggtatcggagacaggtacgatgctgcccagttacgaatcttggccggccccgcgggggattccaacgtggtgaaacttcaacgcatagaggatctgccgacgatggtgaccctaggaaacagttttttgcataagctttgttccggattcgtaagaatctgcatggatgaggacgggaatgagaaacggccaggcgatgtgtggacactacctgaccaatgccacacagtcacctgccagcccgatggacagactctactgaagtctcacagagtaaactgtgataggggcctcagaccctcatgtccaaattcacagtcaccagtcaaggtggaggagacttgcggatgtcggtggacatgtccttgcgtatgcactggtagctccacccggcacatcgtgaccttcgatgggcagaactttaaactgacgggcagttgctcttacgtgctctttcagaacaaagagcaggatcttgaggttatacttcacaatggggcttgttcaccaggagcgaggcaaggctgcatgaagagtattgaggtcaaacattccgctctgagtgtggaactgcactcggatatggaagtgacggtcaatggcaggctcgtgtccgtgccatacgtaggcggtaacatggaagttaacgtatatggcgccattatgcatgaggtgaggttcaatcatctgggccacatattcacgtttacgccccagaacaacgaattccaactacagctttcgcccaaaacctttgcgagcaagacctacggcctgtgtgggatctgtgatgagaacggcgctaatgacttcatgttgcgtgatggaacagtcacaaccgattggaagaccttggtgcaggaatggacagtccagcgacctggccagacctgtcagcctatcctggaagagcagtgtctcgtgcccgacagcagccactgtcaggttctactgctacccctattcgccgaatgccataaggtactggcccccgccacattctatgcaatttgccagcaagattcctgtcatcaagagcaggtttgtgaggtgatcgcctcctacgctcatctatgtaggaccaacggggtgtgcgtggattggcggacacccgatttttgtgccatgagctgccccccctctttagtgtacaaccattgcgagcatggctgcccccggcattgcgacggaaatgtgagcagttgcggagaccaccctagcgaaggctgcttctgtcctcccgataaagtgatgttggagggctcttgcgtccctgaggaggcctgtactcagtgcattggcgaggatggcgtgcagcaccagttcctggaggcctgggtcccggatcaccagccgtgccagatctgtacctgtctatcggggcgcaaagtgaattgcaccacccagccatgccctacagcaaaagcccccacatgtggattgtgcgaagttgcccggctcagacagaatgctgaccaatgttgtccagagtacgagtgcgtgtgcgaccctgtttcttgtgatttgccaccagtgccccactgcgagagaggactccagcccacactcactaaccccggagaatgccgcccaaacttcacatgcgcctgccggaaggaggagtgtaagcgagtttcacctcctagctgtccaccgcaccgtttacctacccttcggaagactcagtgctgcgacgagtacgagtgcgcatgcaactgtgtaaacagcacggtgtcttgtccactgggctatctggcctctaccgcgactaatgattgcgggtgcacaaccacaacctgcctgcccgacaaagtttgtgttcacagatccacaatatatcctgtggggcagttttgggaggaggggtgtgacgtgtgtacctgtactgacatggaggacgctgtcatggggttaagggtggcacagtgcagccaaaagccttgcgaggacagttgcaggtcaggcttcacctacgtgcttcacgagggcgagtgctgcggaaggtgtctgccgtctgcctgtgaggtggttaccggtagtccccggggtgactcccagtcctcctggaagtcagtggggtctcaatgggccagtccagagaacccatgtctgataaacgagtgtgtgagagtcaaagaggaggtgtttattcaacagcgtaacgtctcctgtccccaactggaggttccagtgtgtccatccggttttcagctgtcatgcaagacatccgcctgttgtccgagctgccggtgtgaaaggatggaggcatgcatgctgaatggaacagtaattgggcccggtaaaacggtgatgatcgatgtctgcaccacttgtcgatgtatggtgcaagttggcgtcatcagcggtttcaagctcgagtgccggaaaacaacctgtaatccctgccctctgggatacaaagaagagaacaacaccggtgagtgttgcggcaggtgcttgcctacagcatgtacaatccaactcaggggaggacaaattatgacattgaagagggacgagacactccaagacgggtgtgatacacacttctgtaaggtgaacgaacgcggcgaatacttttgggaaaaacgcgtaaccggatgccctccatttgatgagcataagtgtctagcagaaggagggaaaatcatgaagattcccggaacctgttgcgatacgtgcgaggaacctgaatgtaatgatatcactgcacggctgcaatacgtgaaagtcggctcttgcaagagtgaagtcgaggtggatatccattattgccagggaaagtgcgccagtaaagccatgtatagcattgacatcaacgatgtgcaggatcagtgttcttgctgcagtccaacacggacagagcccatgcaggtggccttacactgtaccaacggctccgtggtgtatcatgaggttcttaatgccatggaatgcaagtgctctcctcggaagtgttcaaag

SEQ ID NO: 21317 - DNA, 8439 bp, synthetic construct
  misc_feature 1..8439: note = source = /note="Description of Artificial Sequence: Synthetic coding sequence"
  source 1..8439: mol_type = other DNA
atgatccctgctaggttcgcaggggtgttgctggccctggccctcatcctgccaggcactttgtgcgcggaaggcactcgggggagatcatccacggctaggtgttctctgtttggctcggatttcgtgaacacctttgacggctctatgtattccttcgcggggtactgtagctacctactcgccgggggctgtcagaagaggtcattttcaatcattggcgacttccaaaacggaaagcgcgtgagtctctcggtgtatttaggtgagttcttcgatatccatttgtttgttaacggaactgtgacgcagggggaccagcgcgtgtccatgccctacgcttctaaaggcctgtatctcgaaaccgaggcagggtattacaagttatctggtgaagcatacggatttgtggcccgaatcgatgggagcggtaattttcaggtactgctctccgaccgttattttaacaaaacctgcgggctctgtggcaactttaatattttcgcagaggacgattttatgacccaagagggcactttaacgtctgacccctacgacttcgctaattcctgggccctgtcgtctggagagcagtggtgtgaaagagcatcacctcccagcagctcatgcaacatctcgtcaggtgagatgcagaagggactgtgggagcagtgccagctgcttaaatcaactagcgtattcgccaggtgtcacccactggttgatcccgagcctttcgtggccctgtgcgagaaaacgctgtgcgagtgcgccggcggtctggaatgcgcctgtcccgctttgctcgaatatgctcggacatgtgctcaggagggaatggtgctctacgggtggaccgaccactccgcatgctcaccagtgtgccctgccggtatggaataccgccagtgtgtgagcccatgtgcgaggacgtgccaatcgctgcatataaacgaaatgtgtcaggaaaggtgcgtggacggttgcagctgcccagagggacagctcctagacgaagggctttgtgtggaatctaccgaatgcccctgtgtccatagcggtaaaaggtacccaccaggaacaagtctgagtagagactgcaacacatgtatttgtcgaaacagccagtggatctgcagcaacgaagagtgtcccggggagtgcttagtgaccggacagtcccatttcaagtcctttgataatagatattttactttttctgggatctgccaatatctcctcgcacgagactgtcaagatcacagcttttctatcgtgatcgaaaccgtacagtgtgccgacgatcgagacgccgtctgtacccggagcgtgacggtgaggttaccaggcctccacaactccctggtgaagctgaaacatggcgctggagtggccatggacggccaagatgtgcagctgcccttgctgaaaggcgacctccggatccaacacacagtgaccgcctctgtcaggctctcctacggtgaggacctgcagatggactgggacgggagaggaagattattggtcaagttaagtccagtctatgccgggaagacctgtggactctgcgggaattacaatggcaatcagggagacgacttcttaacccccagtggactggccgagccccgagtggaagatttcggtaatgcctggaagctgcacggagattgtcaggacttacagaaacagcatagcgacccttgtgctttgaatccccgaatgacccggttctccgaagaagcttgcgccgtgctgacaagccctacgtttgaagcgtgccacagagccgtgtctccattgccatacctgaggaattgccggtacgatgtttgttcctgtagcgacgggagagagtgcttgtgtggcgccttagcctcctacgccgcggcatgcgcaggtcggggagtacgggtggcttggcgggagccaggtcggtgcgagttgaattgccctaagggtcaggtctacttgcagtgtggtacaccgtgtaacttgacctgccggagcttgtcttatcccgatgaggaatgtaatgaagcttgtctggaaggctgtttctgtccccctgggctgtacatggatgagaggggggattgtgtcccgaaagcccagtgtccttgctactacgatggcgagatattccagccggaagatattttttcagatcatcacacaatgtgctactgtgaggacggcttcatgcattgcaccatgagtggcgtaccaggctccctcttgcctgacgccgttttgagtagccctctgagccaccgatcaaagaggagcctgtcttgtaggcccccgatggtaaaactagtgtgcccggcagacaatctcagggcggaagggctggaatgcacaaagacatgccagaactacgatctggagtgtatgtctatggggtgcgtgagcggctgtctgtgcccacccggaatggtgcgccacgaaaaccggtgcgtcgcactagagaggtgtccctgttttcatcagggcaaggagtacgctcccggggagaccgtcaagataggatgcaatacctgcgtctgccaggacagaaagtggaactgcaccgaccacgtgtgtgacgcaacctgttctacaatagggatggcacattatctcacttttgatggattgaaatatctttttccaggtgagtgccaatacgtcctcgtccaggactactgcggctccaatccagggacgttccgtattctggtcggcaacaaaggctgtagccaccctagcgtaaagtgcaaaaaaagggttacaattctcgtggagggcggagaaattgagctcttcgatggcgaagtgaacgtcaagaggccgatgaaggacgaaacgcatttcgaggtggtggaatcaggccgctatatcatccttctgcttggcaaggcactgtcagtcgtgtgggatagacacctgtctataagcgtggtgctgaaacagacctaccaggagaaagtgtgcggtctgtgcgggaacttcgacggaatccagaataatgacctgacttcttccaacctccaggtggaggaggacccagtcgacttcgggaattcctggaaagtgagctctcaatgcgctgacacccgtaaagtgccactggacagctccccagctacctgtcacaacaatatcatgaagcagactatggtggatagcagctgtcgcatcctcaccagtgatgtcttccaggactgtaataaacttgtggatccagaaccctatttggatgtgtgtatctacgacacctgctcctgcgagagcattggggactgcgcatgcttttgtgataccatcgctgcgtacgctcatgtttgcgcccagcacgggaaagttgtgacatggcgcacagcgactctttgcccccagtcatgcgaggagaggaatctccgtgaaaatggctatgagtgcgagtggagatataacagttgcgccccggcttgtcaggtcacttgccagcaccctgagcccctcgcttgtcccgtccagtgcgtggagggctgccacgctcactgccctcctggcaaaatcctggacgagttattgcagacatgcgtggatcctgaggactgcccagtctgcgaagttgctggaaggcgtttcgcttccggtaagaaggtgaccctgaatccctctgaccctgagcattgccagatttgtcattgcgatgttgtgaacctgacgtgcgaagcctgtcaggagccagggggattagtggtgccccccacagatgcccccgtgtctcctaccactctctatgtggaggacatctctgaaccacccctgcacgatttttactgtagcaggctcttggatctcgttttcctcttggatggatccagcagactttccgaggccgagttcgaggtgctgaaggcatttgttgtggatatgatggagcgcctcagaatcagccagaagtgggttcgggttgctgtggtggagtaccacgacggctcacatgcctatatcggcctgaaagaccgcaaacgcccttctgagctgaggaggattgctagtcaggttaagtacgccggcagccaggtggcgtcaacatcggaggtcctgaaatacaccctgttccagattttttccaagattgatcggccggaggccagtagaatcaccctccttttgatggcctcacaggagccccagcgaatgtccaggaatttcgtgagatacgtgcagggcctcaagaagaagaaagtgatcgtcataccagtgggaatcggcccacacgcgaacctaaagcagatcaggttgatcgagaagcaggcccccgaaaataaggcctttgtgcttagcagcgttgacgagctggaacagcagagggatgagattgtgagctatttgtgtgacctggctcccgaggcgcccccgccgaccctccctccagatatggcccaagttaccgtcggacccggcctgttgggcgtctctaccctgggacccaaacgcaattctatggtcttggatgtggcgttcgttcttgaagggagtgataagatcggagaagccgacttcaaccggagcaaggaatttatggaggaggtgatacagcggatggacgtgggtcaggatagtatccatgtcacagtgcttcagtattcttatatggtgactgtcgaatatccatttagcgaagcccagtcgaagggagacattcttcagcgggtaagggagattcgatatcagggcgggaaccggaccaatactggcctcgcactgcggtatctgtccgatcactcttttctcgtgagccaaggcgatagggaacaagcaccaaatctggtttacatggtaaccggaaacccagcttcagatgagatcaaaaggctccccggagacatccaggttgtgccaatcggtgttgggcccaatgccaacgtgcaagaattggagcgaattggatggcctaacgcccctatactgatccaagacttcgagaccttgccccgggaggctcccgacctggtgctacagcgctgctgtagcggcgaaggacttcagatccccactttgtctcctgcaccagattgcagccagcctctggacgtgattctcctcttggatggtagtagtagcttcccagcttcttatttcgatgaaatgaagtcttttgccaaagcattcatcagtaaagcgaatatcgggccccgactgactcaggtgtcggttctccagtatggaagcattacaacaattgacgtcccttggaacgtcgtccccgagaaggcccatctactcagtctagtggacgtgatgcagcgcgaaggcggaccttcccagatcggagatgccctgggctttgccgtacggtatttaactagtgagatgcacggggctagacctggggcatccaaagccgtggtaatactggttaccgatgtttccgtagattccgtcgacgccgcagcagacgctgctagaagtaaccgggtgaccgtttttcctatcggaatcggagatagatacgacgccgcacaacttcggatcctggctggcccagcaggagactctaatgttgtgaaactgcagaggatagaggaccttcccacaatggtgaccctcgggaatagtttcttacataagctctgcagtgggtttgtgcgaatttgcatggatgaagacggcaatgagaaacgcccgggtgatgtgtggaccttgccagatcagtgtcacactgtcacgtgccaacctgatgggcagaccctcttaaagagtcatagagtgaactgtgaccgggggctccgaccgtcctgtcccaactcccagagtccagtgaaagtggaagaaacttgcggatgtcgttggacctgtccatgtgtgtgtacaggctctagcacgcgacatattgtcacatttgacggacaaaatttcaaactaactggctcttgcagctatgtgctgttccagaacaaagaacaggaccttgaggtgattcttcacaatggcgcctgtagtcctggggcgcgacagggatgtatgaaaagcatcgaagttaaacacagcgcactgagtgttgagctccatagtgatatggaggtgacagtgaacggtcggctcgttagtgtgccatacgtcgggggtaatatggaggtcaacgtgtatggagctatcatgcacgaggttcgattcaaccacctgggccacatcttcacctttaccccgcagaacaacgagtttcagctgcaactgagccccaagaccttcgccagtaagacttatggcttgtgcggtatctgtgacgaaaatggggcaaacgattttatgctgcgcgacggaactgtaacaaccgattggaaaaccctcgtccaggagtggaccgtgcaaagaccgggtcagacctgccagccaattctcgaagagcaatgcctggtccctgattcaagtcactgtcaggttctgctgttacccttgttcgcagaatgtcataaggtgctggctcccgcaacattctatgcaatttgtcagcaggatagttgtcatcaggagcaggtctgcgaggtaatagcctcttacgcacacctctgccggacaaacggcgtgtgcgtggattggcgaactcctgatttttgtgcaatgtcatgtccaccttccctcgtgtataatcactgcgagcatggctgcccccggcattgtgacggtaacgtcagctcatgtggcgatcatcccagcgagggatgtttctgtccaccagacaaagtaatgctggaaggcagctgtgtgcctgaggaagcttgcactcagtgcataggcgaggacggtgttcagcatcagttccttgaagcgtgggtgcccgaccatcaaccgtgccagatttgcacatgtctgtcaggtagaaaagttaactgtacaactcagccatgccctaccgctaaagcccccacttgcggactctgcgaggtcgcaaggctgcggcaaaacgccgatcagtgctgccccgaatatgagtgcgtatgcgatcccgtgtcctgcgacctgcctcccgttccgcactgcgagcgcggtctgcaaccaacactgactaacccaggggagtgtagacccaactttacttgtgcatgccgcaaggaagagtgcaaaagggtgtccccaccctcgtgcccaccccatcgcctaccgacactgcgcaagactcagtgctgtgatgagtacgaatgtgcctgcaattgtgtgaacagcacggtgtcgtgtcctctggggtacctcgcctccactgccacgaacgactgtggatgtacaactacgacatgtctgcctgacaaagtatgtgtccacagaagcacaatttatccagtgggccagttctgggaggagggctgcgacgtgtgtacgtgtaccgacatggaagatgctgtgatgggattaagggtagcacagtgttcgcagaagccgtgcgaggacagctgcaggagcggcttcacatacgtacttcacgagggagagtgctgcgggcgatgcctgcctagcgcctgtgaggtggtgactggttcccctcgcggcgactcacaaagcagttggaagtccgttggctcgcagtgggcatctccagaaaatccatgcctaatcaacgagtgtgtgcgcgtgaaggaggaggttttcatccaacagagaaatgtgtcatgtcctcaacttgaagttcccgtgtgtccttctggatttcagctctcttgcaaaactagcgcttgctgccccagctgccgatgtgaacggatggaggcgtgtatgctcaatggtaccgtcatcggccccggcaagacagtcatgatagacgtgtgcactacgtgccggtgcatggtgcaggtgggggtgataagcggcttcaagctcgaatgtcggaaaacgacatgtaacccgtgcccattgggttataaagaggaaaacaacacaggggaatgctgcggacggtgtctacccactgcatgcactatacagctaagaggaggccagatcatgacattaaagcgtgatgaaacattacaagatggatgcgacacgcacttctgcaaggtgaacgaacgaggagaatacttctgggaaaagcgcgtgacgggctgtccaccatttgatgaacataaatgcctcgctgagggcggcaaaatcatgaaaatcccaggcacttgctgtgacacatgtgaagagccagagtgtaacgacataaccgcacgactgcagtatgtcaaggttgggtcgtgcaaatcggaagtcgaggtggacatccattactgtcagggaaagtgtgcatctaaggccatgtattccatagacatcaacgacgtccaggatcagtgctcctgctgctctccaacaagaaccgaacctatgcaggtcgccttgcattgcacaaatggaagcgtggtgtaccatgaagttctgaacgcaatggagtgcaaatgcagtcccagaaagtgcagcaag

SEQ ID NO: 21318 - DNA, 8439 bp, synthetic construct
  misc_feature 1..8439: note = source = /note="Description of Artificial Sequence: Synthetic coding sequence"
  source 1..8439: mol_type = other DNA
atgataccagcccgctttgcgggagttcttttggcccttgccctcattctccctggcaccctgtgtgcggagggtactcgcggacgatcctctaccgcaagatgctccctgttcggctccgatttcgtcaacacttttgatggttcgatgtacagctttgcagggtactgctcgtacctcctggcgggcgggtgtcagaagcggtcgttttcgatcattggagatttccagaacggaaagagagtctcgctgtcagtgtaccttggcgagtttttcgacatacatctgtttgtgaatgggactgtgactcaaggtgatcagcgcgtgtccatgccttacgcatccaaaggactctatcttgaaaccgaggctggatattacaagttgtcgggcgaagcctacgggttcgtagcaagaatagacggatccggcaacttccaggtgctgctcagcgatcgctactttaacaaaacttgcgggctttgcggaaactttaacatcttcgcagaggacgactttatgacgcaggagggtactttgacctccgatccatacgattttgcaaactcgtgggcgctgtcctcaggcgagcagtggtgtgaaagggcatcacccccatcatcatcctgcaacataagttcgggtgaaatgcaaaaggggctttgggaacaatgtcaactgcttaagtccacttctgtgtttgcaagatgtcatcctttggtggaccctgaaccctttgtggctctctgtgaaaagactttgtgtgaatgcgcaggaggtcttgaatgcgcctgccccgctttgcttgagtacgcgcgaacttgcgcacaagaaggaatggtcctttacgggtggacggaccactcagcttgcagccccgtttgtcccgcaggtatggagtacagacagtgtgtgtctccatgtgcccgaacttgccaaagcctgcatatcaacgagatgtgtcaggaacggtgtgtggatgggtgttcatgccctgaagggcaactcttggacgagggtctgtgtgtggagagtacggagtgcccatgcgtccactcgggaaagcggtacccccctggaacctcgctttcccgggactgcaacacctgcatttgtagaaattcgcagtggatttgttcgaacgaagagtgtccaggagagtgtctggtgaccggtcagtcacacttcaagtcgtttgacaacagatacttcactttttcaggtatatgtcaatacctcctcgcgcgcgattgtcaggaccatagctttagcattgtgatcgaaaccgtgcaatgtgcagatgaccgggacgcagtgtgcactcgatcagtcaccgttcgccttcctggcctgcataacagcctggtgaagctcaagcacggcgctggcgtcgccatggacggccaggacgttcaactgcccctgctcaagggcgatcttaggattcaacatacggttaccgcgagcgtgaggctttcctacggtgaagatctccaaatggactgggatggacgaggacggctcctggtgaaactttccccagtgtacgcagggaaaacctgtggtctgtgcggtaattacaacggaaatcagggtgatgatttcttgactccatcgggccttgcagagcccagagtggaagatttcggaaacgcatggaagctgcatggagactgtcaggatcttcaaaagcaacattcggatccgtgtgcactgaatccacgtatgacgagattttcagaagaagcatgtgcagtcctgacttcccctactttcgaagcatgtcatcgcgcagtctcaccgctgccatacctgcgaaattgtaggtacgacgtgtgtagctgtagcgatggaagagaatgtctgtgtggcgcgcttgcaagctacgcagcagcctgcgcaggacgtggcgttcgtgtggcatggagagagcctgggagatgtgaactgaactgtccaaagggacaagtgtaccttcaatgtggaactccctgcaacctgacctgcaggagcctgtcgtaccctgacgaagagtgtaacgaagcctgcttggaaggatgcttctgcccaccaggcctctacatggacgaacgtggagattgtgtgccgaaagcccaatgcccatgttattacgacggcgagattttccaaccagaagatatcttttcggaccatcatactatgtgctactgtgaggatggatttatgcattgcaccatgtcaggggtgcctggcagcctcttgcctgacgcagtcctgagttcacctctttctcaccgctcgaagagatccctttcttgtagacctcctatggtcaagctggtgtgtcccgcagacaaccttcgcgcagaagggttggaatgtactaaaacttgtcaaaactacgaccttgagtgcatgtcgatgggatgtgtgtcaggttgtttgtgtccacctggaatggtgcgccatgagaataggtgcgtggcacttgaacgatgtccctgttttcatcagggtaaggaatatgcccctggtgaaaccgtgaagattgggtgtaatacttgtgtgtgtcaggatagaaaatggaattgcactgaccatgtgtgtgatgcaacgtgttctactatagggatggcccactatcttacctttgacggactcaagtacctttttcctggtgaatgtcaatacgtgcttgtgcaagactattgcggatcaaaccccggaacttttaggatccttgtgggaaacaagggatgttcgcatccatccgtgaagtgcaagaagagagtgactatcctggtggaagggggcgagattgaacttttcgatggggaagtgaatgtgaagcgccctatgaaggacgaaacccatttcgaggtggtggagtcagggagatacattatccttcttcttggtaaggctctgtctgtggtgtgggatcggcatctcagcatcagcgtggtgctcaaacagacttaccaagaaaaagtctgtggactttgtgggaatttcgatggcattcagaataacgatctcacttcgtcgaacctgcaagtggaagaggatccggtggattttgggaatagctggaaggtttcatcccaatgtgcggatactaggaaggtgccactggatagtagccctgcaacgtgccacaataacatcatgaaacagaccatggtcgactcctcttgtcggatcctcacctcagatgtctttcaagattgtaataagttggtcgatccagaaccttacctggacgtgtgtatctacgatacttgcagctgcgaatcaattggagattgtgcctgtttttgtgataccattgctgcctacgcacatgtctgtgcccagcacggtaaggtcgtgacctggcggaccgcgaccctttgtcctcaatcatgcgaggaacggaacctcagagagaacggttatgaatgtgagtggcggtacaattcatgcgcaccagcatgtcaagtgacttgtcaacatcccgagcctctggcgtgcccggtgcagtgcgtggagggatgccatgcccattgccccccgggtaagatccttgatgaactgttgcagacttgtgtcgaccctgaggattgccctgtctgtgaggtcgccggtagacggtttgccagcggaaagaaggtgactctgaacccttcggatcctgagcattgccaaatttgtcattgcgacgtggtcaacctgacgtgtgaagcgtgtcaagaaccaggaggcctcgtagtgccacccactgacgcacctgtgagcccaacgaccctgtacgttgaagatatctcagagcctccccttcacgatttctattgttcccgtctcctggacctggtgtttctcctcgatggatccagccggctttcggaagcggagtttgaagtgcttaaggcctttgtggtcgacatgatggaaagactgcgtatttcacaaaagtgggtacgcgtcgcggtagtcgaataccatgatggttcccatgcatacataggtctgaaggataggaagcggccaagcgaattgagacgcatcgctagccaggtgaaatacgccggatcccaagtggcgtcgacctctgaagttctcaagtacacccttttccagattttctccaaaatagatcgaccagaggcttcacgtataacccttcttcttatggcctcgcaggaacctcaaagaatgtcgcggaactttgtgagatacgtccagggattgaagaagaaaaaggtgattgtgattccagtgggaataggacctcatgcaaatctgaagcaaattaggttgattgaaaaacaagccccagaaaacaaggcattcgtcctttcctcagtcgatgaactggaacaacaacgcgatgagatagtgagttacctttgcgacctggcacccgaagcgcccccacctacccttcctccagatatggcacaggtgactgtgggcccaggattgctgggtgtaagcactctgggcccgaagaggaactctatggtcctcgacgtggcatttgtcctcgaagggagcgacaaaattggagaagcagactttaaccgctcgaaggagttcatggaagaggtgattcagcgcatggacgtgggccaggactcgatacatgtgaccgtcctgcagtactcgtatatggtaactgtcgaatacccgtttagcgaagctcaatccaaaggggatatcctccagcgtgtgagggaaattaggtaccagggagggaacagaaccaacaccggcctggcacttaggtacttgagcgatcacagctttctcgtgtcacaaggcgatagagaacaagcacctaatcttgtgtacatggtgaccggtaacccagcatcggatgaaatcaagcgcctgcctggggacatccaggtggtgcctattggtgtcggcccaaacgcaaatgtccaggaactggagaggattgggtggcccaatgcaccaatcctgattcaagatttcgaaaccctgccccgtgaggcacctgatctggtgcttcaacggtgttgctcgggcgaaggcctgcaaatccctactttgtcacctgcacctgattgttctcaacctcttgacgtcatactgcttctggatggaagctcgtcatttcccgcatcgtactttgacgaaatgaagagcttcgcaaaggcatttatctcaaaagccaacatcggacccagactcactcaggtgtccgtcctgcaatacggatctatcaccacgatcgatgtcccctggaacgtcgtgcctgaaaaagcgcacctcctgagcctcgtggatgtgatgcaaagagagggtggtccttcccaaattggagatgcactgggatttgccgtcagatacctgacttcggaaatgcatggagcccgccctggcgcgtcgaaagcagtggtgattcttgtgaccgatgtgtcggtggacagcgtcgatgcagccgcagacgcagcaagatcgaaccgtgtcactgtattccccattggaatcggtgacaggtacgacgctgcacagctccggatcctggccgggcctgcaggtgatagcaatgtggttaagttgcaaagaattgaggatctgcctaccatggtgactcttggtaactcctttctgcacaagctgtgttcgggattcgtgcggatctgcatggatgaagatggaaatgagaagcggccaggggatgtctggaccttgcctgaccagtgtcacaccgtcacttgtcaaccagatggtcaaacgctcctcaaatcgcatagggtcaactgtgatcgcggactgcgaccgtcctgccctaactcacaatccccagtgaaggtggaagaaacctgtggatgtagatggacctgcccgtgtgtctgtactggttcgtccactcgccatattgtgacgttcgacggtcagaatttcaaacttaccggatcgtgctcttacgtgctttttcagaataaagaacaagatctggaggtgatcctgcacaatggtgcttgtagcccaggcgctagacagggatgcatgaaaagcatcgaagtcaagcattccgcactgagcgtggaactgcactcggatatggaagtgaccgtgaatggaaggctcgtctccgtgccatacgtcgggggcaacatggaagtaaacgtgtatggtgcgattatgcacgaagtgaggtttaatcatctcggacatatctttactttcactcctcaaaacaatgagtttcagcttcagctttccccaaagacgtttgcatccaaaacctacggactgtgtggtatttgtgacgaaaatggcgctaacgactttatgctgcgggatggaactgtgaccaccgactggaaaaccctggtgcaggagtggactgtccagaggcccggacaaacctgtcaacccatactggaggaacagtgtctggtccctgattcgtcccattgtcaggtgcttcttctccctctttttgcagaatgtcataaggtgctcgcaccggctaccttttacgcaatttgccagcaagattcctgtcaccaagaacaagtgtgcgaggtcattgcctcatacgcccacctttgtcgcaccaacggtgtctgtgttgattggagaaccccagacttctgtgcaatgtcgtgcccgccttccctcgtgtacaaccactgcgaacatgggtgtcctaggcactgcgatggtaacgtatcttcctgtggggatcaccccagcgaagggtgtttctgtccccctgacaaggtcatgctggaaggaagctgtgtccccgaggaagcatgtacgcagtgcattggagaggatggcgttcagcatcagtttctggaggcttgggtgcctgatcatcaaccatgccagatttgtacgtgcctctcagggagaaaagtgaattgtaccacccaaccatgtcctaccgcgaaggcgcctacttgtggcctctgcgaagtggcaagacttcgtcaaaacgcagatcaatgctgtcccgagtacgaatgcgtttgtgatcctgtgagctgtgacctccctccagtcccgcactgcgagcgcggcctgcaacccaccctgaccaacccaggtgaatgtagacctaacttcacctgcgcatgtcgaaaggaagagtgcaagcgggtgtccccgccctcctgtccgccgcatagactgccgactcttcgcaagactcagtgttgcgatgaatacgagtgtgcctgcaattgtgtgaacagcaccgtgagctgcccgctgggttacctcgcatccaccgcgactaacgattgcggatgtactaccaccacctgccttccagataaggtctgtgtgcaccgatccactatttaccccgtgggtcagttttgggaggaaggatgtgacgtttgcacttgtactgatatggaggatgccgtgatgggacttcgggtagcacagtgttcccagaagccttgtgaggatagctgtcgttctggattcacctacgtgctgcacgaaggagaatgctgcggacgttgcttgccatccgcatgtgaagtggtcaccgggtcaccacgcggcgactcgcaatcctcctggaaatccgtcggaagccaatgggcctcacctgaaaatccatgcctgattaacgagtgcgtccgagtgaaagaagaggtctttattcagcagcgaaacgtgtcgtgcccccagcttgaagtgccagtgtgcccaagcggctttcagcttagctgtaagacctccgcatgctgtccctcgtgcagatgtgaaaggatggaggcctgtatgcttaatggaaccgtgattggacctggtaagactgtgatgattgatgtctgcaccacgtgtcggtgcatggtgcaggttggtgtcatctcaggcttcaaactggaatgtagaaagaccacctgtaacccttgtccgctggggtacaaagaagagaacaataccggcgagtgttgtggacggtgccttcctacggcctgtaccatccaattgcggggaggacaaatcatgactctcaaacgggacgaaactcttcaggatggttgtgatacccatttttgtaaggtcaatgagaggggtgaatacttttgggaaaagcgcgtgaccggatgtcctccgtttgatgaacacaagtgtcttgccgaaggaggaaaaatcatgaagattcctggtacgtgttgtgacacctgtgaagagccagagtgcaacgatattaccgccagactgcaatacgtgaaggtcggctcgtgtaaatcggaagtcgaagtcgatattcattactgtcaagggaagtgcgctagcaaggcaatgtactcgatcgacattaacgatgtgcaagaccaatgctcctgttgctcaccaactagaaccgagcctatgcaagtggcactccattgtaccaatggatccgtggtttaccacgaagtgctcaacgccatggaatgtaaatgctcaccacgaaagtgttccaag

SEQ ID NO: 21319 - DNA, 8439 bp, synthetic construct
  misc_feature 1..8439: note = source = /note="Description of Artificial Sequence: Synthetic coding sequence"
  source 1..8439: mol_type = other DNA
atgatcccagctcgctttgctggggtgctgctggcccttgcgctgatcctgccgggaactttgtgcgcagagggtacccgcgggcgttcatcgaccgcgcgctgttccctgttcggctcagacttcgtgaataccttcgacggatccatgtactcattcgcgggttactgtagctacctcttggccggaggatgccaaaagcggtccttctcgattatcggagatttccagaacggcaagcgcgtctccctgtccgtctaccttggtgaattcttcgacatccacctctttgtgaatggaaccgtgacccaaggcgaccagcgggtgtcgatgccgtacgccagcaagggcctctacctggaaaccgaagccggatactacaagctgtcaggagaagcgtacggattcgtggcgcggatagacggaagcggcaacttccaagtgctcctgtccgaccgctacttcaacaagacttgcggcctgtgcgggaactttaacatcttcgccgaggacgacttcatgacccaggaaggaactctgacctcagatccttacgactttgccaactcttgggcactgtcctccggcgaacaatggtgcgaacgggcctcaccgccgtcctcctcctgcaacatttcctctggcgaaatgcagaagggactctgggagcaatgccaactgctgaagtcgaccagtgtattcgccagatgccacccgctggttgatccggaaccattcgtggccctgtgcgaaaagacgctgtgcgagtgtgcgggaggactggagtgtgcctgcccggccctcctggagtacgcaagaacctgcgcccaagagggcatggtgctgtacggatggactgaccattcggcgtgctcgcccgtttgtccggctggaatggagtatcgccagtgcgtgagcccttgcgcgcgcacgtgccagtccctccacatcaacgaaatgtgtcaggagagatgcgtggacggctgctcctgcccggagggacagctcctggacgagggactgtgcgtcgaaagcactgaatgcccgtgcgttcatagcggcaagaggtatccgccgggaacctcactctcgagagactgtaacacgtgcatctgccgcaatagccagtggatctgctccaacgaggaatgtccgggcgaatgtctcgtcactgggcagtcccacttcaagtcgttcgacaatagatacttcactttcagcggaatttgccaatacctcctggcaagagattgccaggatcatagcttcagtatcgtcatcgagactgtgcaatgcgccgacgatagagatgcagtctgcactcgctcggtgaccgtccggctcccgggattgcacaactcgctggtcaagctcaagcacggagcaggggttgctatggacggccaggatgtgcagctgccactcctgaagggagatctgcgcatacaacatactgtgactgcgtcggtgcggctctcgtacggcgaagatctgcagatggattgggacggacgcggtcgccttctggttaagctgagccccgtgtacgccggtaaaacctgtggcctctgcggtaattacaatggaaaccaaggggacgattttcttaccccttcgggattggcagagccgcgggtggaggatttcggaaacgcatggaaactccacggagactgtcaggacctgcaaaaacaacattcagacccatgcgccttgaacccccgcatgactcggttctcggaggaagcatgtgcggtgctgacttccccgactttcgaagcgtgccaccgcgcagtcagcccgctgccgtacctgagaaattgccggtacgacgtctgctcgtgcagcgatgggagggagtgcctgtgcggggcattggcgtcctacgcggctgcgtgtgcaggcagaggagtgcgggtggcttggcgagagcctggaaggtgcgagctgaattgccctaagggacaggtctacctccagtgcggcactccgtgtaatctcacttgtcgcagcctgtcatacccggatgaagaatgcaacgaggcatgcctggaaggatgcttttgccctccagggctgtacatggacgaacggggagactgcgtgccgaaggcgcagtgtccgtgctactacgacggagagatcttccagccggaggacatcttctcggatcaccatacgatgtgctactgtgaggatggatttatgcactgtaccatgtcgggagtaccgggaagtctcctccccgacgcggtgctgtcaagtccattgagccatcgttctaagcggtcgctttcatgtcgcccgcccatggtgaagctggtgtgcccagccgacaacctgagggcggaaggtttggaatgtaccaagacttgccaaaactacgatcttgaatgcatgtccatgggatgcgtctcgggatgcttgtgcccgccgggaatggtccggcatgagaatcggtgcgtggccctcgaacgctgcccatgcttccatcaaggaaaggagtacgcgccgggggagacggtgaaaattggctgcaacacttgcgtgtgccaggaccgcaaatggaattgcaccgaccacgtgtgtgatgcgacgtgctccactatcggaatggcccattacttgacttttgacggtctgaagtacctgttcccgggtgaatgtcagtacgtcctggtgcaggactactgtgggtccaatccgggaaccttcagaatccttgtgggcaacaagggatgttcacacccgtcagtcaaatgcaagaagagggtgaccatcctcgtcgaaggcggggagatcgaactgtttgacggagaagtgaacgtgaagcggccaatgaaggatgaaacgcacttcgaggttgtggaatcagggcgctacatcatccttctccttggaaaagcgctctccgtcgtgtgggatcgacatctctcgatcagcgtggtccttaagcagacttaccaggaaaaggtctgtgggctgtgcggtaactttgacggcattcagaataacgacctcactagctcgaaccttcaggtagaggaggacccagtggatttcggcaactcgtggaaggtgagctcacaatgtgccgataccagaaaggttccgctggactcgtcacccgcaacctgccacaacaatatcatgaagcaaactatggtggactcgagctgcaggatcctcacctcggacgtttttcaggattgcaataagctcgtagatcccgaaccttacctggatgtttgcatttacgacacttgctcctgcgaatcaatcggagactgcgcttgtttctgcgatacgatcgccgcgtatgctcatgtatgtgcccaacacggaaaggtggtgacctggcggactgccactctgtgtccgcaatcctgcgaggaacggaatcttagagaaaatggttacgaatgcgaatggcggtacaactcatgtgcccccgcctgtcaagttacctgccagcacccagagcccctggcttgccccgtgcagtgtgtggaaggatgccacgcccactgccctccgggaaagatccttgacgagctcttgcagacgtgtgttgaccctgaggattgtccagtttgcgaggtggccggtagacgcttcgcctctggaaagaaagtgactctgaatccgtccgaccctgagcattgtcagatttgccactgtgacgtggtcaatctcacctgcgaagcctgccaagagcccggaggacttgtcgtcccgccaactgacgctccagtgtcccctactaccctgtatgtggaggacatctccgagccgccgttgcatgacttctactgctcgcggctgctcgatctggtttttctgctggacgggtcctctaggctgtcagaagccgagttcgaggttctcaaggcgttcgtggtggatatgatggagcgtctcagaatctcgcaaaaatgggttagagtcgccgttgtggagtaccacgacggaagccacgcttacatcggccttaaagacagaaagcgacctagcgaacttagaaggatcgcctcacaagtgaagtacgccggttcgcaggtggcgtcaactagcgaggtgctcaaatacaccttgttccagatcttttcaaagatcgatcgcccagaagcctcgcgcatcactctgctcctgatggcatcacaggagccgcagcgcatgtctaggaacttcgtccggtacgtccagggcctcaagaaaaagaaggtcatcgtcatcccggtcggcatcggcccacatgctaacctgaagcaaatcagacttatcgagaagcaggcgcccgaaaacaaagcgtttgtgcttagttcagtggacgagctcgaacaacaacgcgacgaaatcgtgagctatctgtgcgatttggcgccggaagcaccaccgccgactctcccgcctgacatggcacaggtgaccgtgggacctgggttgttgggggtaagcaccctgggaccaaaacggaactcgatggtcctggacgtggcgtttgtcctggagggctccgacaagatcggggaggcagacttcaatcgctcaaaggaattcatggaagaagtgatccagcggatggatgtgggccaggattcgattcacgtgaccgtgctgcagtactcctacatggtgaccgtggaatacccgttttccgaagctcaatcaaagggcgacatattgcagcgcgtgagagagatccggtaccaggggggaaacagaaccaatacgggattggctctccgctacctgtctgatcactccttcctggtgtcccagggcgaccgagaacaagcaccaaatcttgtgtatatggtgacggggaacccggcaagcgatgagatcaaacgcctgccgggagatatccaagtcgtgccaatcggtgtggggcctaacgcgaatgtgcaagagctggagaggattggatggccaaatgccccaatccttatccaggacttcgagacgctgccgcgcgaagccccagatctggtgctgcagcggtgttgctcgggcgaggggctccaaatcccgactctgtctccggccccggattgctcgcagccactggacgtgatcctcctcctggacggatcgtcaagtttcccagcgagctacttcgatgagatgaagagtttcgcaaaggccttcatctccaaggctaacattggacctcggctcactcaggtgtccgtcctgcagtacggatcgataaccactatcgatgtgccatggaacgtggtgccggaaaaggcccacctgttgtccctggtggacgtgatgcaacgcgaaggcggaccatctcagatcggagacgccctgggattcgcagtgcggtacctgacgtcagagatgcacggagcgcggcctggggcgtccaaggcggtcgtcatcctcgtgaccgacgtctcggtcgactccgtcgacgccgccgccgatgctgccagatcaaaccgcgtgacggtgttcccgattggcattggcgatcggtacgacgccgcccaactgcgcattctcgccgggcccgccggagattccaacgtggtgaagctccagaggattgaggatctgccaaccatggtgaccctcggaaactccttcctgcacaaactctgttcaggatttgtcagaatctgcatggatgaagatggaaatgagaagcgacctggagacgtgtggactctgccggaccagtgccacacggtgacctgccaaccggacggccaaaccctcctgaagtcccatcgggtaaattgcgatcgcggactgcggcccagctgtcccaattcgcagagccccgtgaaagtcgaggaaacttgcgggtgccgctggacttgtccctgcgtgtgcactggaagctctactaggcacatcgtcaccttcgatggacagaacttcaaactgactggctcatgctcctacgtgctctttcaaaacaaagagcaagatctggaagtgattctccacaacggggcctgtagcccaggcgccagacagggatgtatgaaatctatcgaagtgaaacattccgccctgtccgtggaacttcactcagacatggaggtgactgtcaatggccgcctggtgtcggtaccgtacgtcggcggaaacatggaagtcaacgtctacggggccatcatgcacgaagtgagattcaaccacctgggacatatcttcaccttcactccgcagaacaacgagtttcagctgcagctctcgcctaaaaccttcgcgagcaagacctatgggctttgcggaatctgtgatgagaacggcgctaatgacttcatgctccgcgatgggaccgtgacgaccgattggaaaactctggtgcaggaatggaccgtgcagcggccaggacagacctgtcagcccatccttgaggaacagtgcttggtgccagactcgtcacactgccaagttctgctgctccctttgtttgcagaatgccacaaagtcctcgctccggcgaccttctacgccatatgccagcaggacagctgtcaccaggaacaagtctgcgaggtgatcgcctcgtacgcccacctgtgccggaccaacggtgtgtgcgtggactggcggaccccggacttttgcgctatgtcctgcccgccgtcgttggtctacaaccattgcgaacatggctgccctaggcattgtgacggtaacgtgagctcctgcggtgaccatccaagcgaaggatgcttctgtccaccggataaagtcatgctggaggggtcctgcgtgcctgaggaggcatgtacccagtgtatcggcgaggacggcgtgcaacatcagttcctggaagcctgggtcccagatcaccagccgtgccagatctgtacctgtctgtcgggcagaaaagtgaactgcacgacccaaccttgccctactgcaaaagcccccacctgcggactgtgcgaagttgctcgcctcaggcaaaacgcagaccaatgctgcccggaatacgaatgtgtctgcgacccggtgtcgtgcgaccttccacccgtgccacactgcgagcgtggcttgcagccgactctcacgaatcctggtgaatgcaggccgaacttcacctgtgcttgtcggaaagaagaatgcaagcgcgtgtcacctccatcatgtccgccccatcggctgcctaccctgcgtaagactcagtgctgcgacgaatatgaatgcgcttgcaattgcgtgaattcgaccgtgtcttgccccttgggttacctcgcgtccactgcgaccaatgattgtggttgtactactactacctgcctcccagataaagtgtgtgtgcaccgctccaccatctacccagttgggcaattctgggaagagggatgcgacgtgtgcacttgtaccgatatggaggacgcagtcatgggactgcgcgtcgcacagtgcagccagaagccttgcgaagattcttgcaggagcggttttacttacgtgctgcacgagggcgaatgctgcggtaggtgtctgccttccgcctgtgaggtcgtgaccggaagcccccgcggagactcccagtcctcgtggaagtcggtcggatcacagtgggccagcccggaaaacccctgtttgatcaacgagtgcgtgcgcgtcaaagaagaagtgttcatccagcaacgcaacgtcagctgcccgcaactcgaagtgcctgtgtgcccatccggttttcagctctcgtgcaaaacttcggcgtgctgcccttcatgcagatgcgagcgcatggaagcatgtatgctgaacggaactgtcatcggtcccggaaagactgtgatgatcgacgtgtgtactacctgtcggtgcatggtgcaagtgggagtgatctccggctttaagctggaatgccggaaaaccacctgcaatccatgcccgctcggatacaaggaagagaacaacaccggggagtgttgtgggcggtgtctgccaaccgcgtgcactatccagctgcgaggaggtcagataatgaccctgaaacgtgatgaaacccttcaagatggttgcgatacccacttctgcaaggtgaacgagcggggagaatacttctgggagaagcgcgtcactggttgccctccgtttgacgagcacaagtgcctcgcagaaggaggcaagattatgaagatcccgggtacctgctgtgacacctgcgaagaaccggaatgtaatgacatcaccgcaaggctgcagtacgtcaaggtgggctcgtgcaagagcgaagtcgaagtcgatatccattactgccagggcaaatgcgcttcaaaggctatgtattcgattgacatcaatgatgtgcaggatcagtgcagctgctgctcacctactcggactgaaccgatgcaagtggccctccattgtactaatggatcggtggtctaccatgaggtcctgaacgctatggaatgtaagtgctcgccacgaaagtgctccaaa

SEQ ID NO: 21320 - DNA, 8439 bp, synthetic construct
  misc_feature 1..8439: note = source = /note="Description of Artificial Sequence: Synthetic coding sequence"
  source 1..8439: mol_type = other DNA
atgatcccagccaggttcgcgggggttctcctagccctcgccctcatcctgcctggaacactctgtgccgaagggacacgagggcggtcttccacagcccggtgttcactatttggatctgactttgtaaatacatttgatgggagtatgtattcctttgcaggatattgtagttatctcctggcaggagggtgtcagaaaagatctttttccatcatcggagattttcagaacggaaaaagggtctccttatcagtctatctgggagagtttttcgatatacacctctttgtgaacggaacagtgactcagggagatcagcgggtgagtatgccatacgctagtaaagggctgtatctggaaactgaagcagggtattataaactatctggagaagcttacggattcgtagcacgaattgatggaagtgggaatttccaggtactgctatcagatcggtattttaacaaaacatgcggactttgcgggaacttcaatatatttgcagaagatgattttatgacacaggaagggacactcactagtgatccctacgatttcgccaattcatgggcattgtcttccggggaacagtggtgcgaacgagcctcccccccctcctcctcatgtaatatatcttctggagaaatgcagaaagggctttgggaacagtgtcagctgctaaaatctacgtcagtctttgccaggtgtcaccctttagtagaccccgaaccattcgttgctctttgcgaaaaaacactctgtgaatgtgcaggagggctagaatgtgcttgccccgccctgctcgaatatgccaggacatgtgcacaagaaggaatggtgttgtacggatggacagatcattccgcatgttcccctgtctgtcccgctgggatggagtaccgacagtgcgttagtccttgtgcaaggacatgtcagagtctgcatataaatgaaatgtgccaggagcgatgtgtagacggatgcagttgtcctgagggacagctcctcgacgagggactatgtgtagagtctactgaatgtccttgcgtccactctggaaaacgatatcctcccggaacatcactctctcgagattgtaacacatgcatttgtaggaactctcagtggatctgttctaacgaggagtgccctggagaatgtctggtgacaggacagtctcattttaagagttttgataacagatatttcacattttccggaatatgtcagtatcttctcgctcgagattgtcaggatcattcgttctctatcgttattgaaacagtgcagtgtgctgatgatcgggatgccgtgtgtactcgctcagtgacagtacgactcccaggattacataacagtctggtaaaactgaagcatggagctggagtcgccatggatggacaggatgtccagctccctctactgaaaggggatttaaggatacagcatactgtgacagctagtgtgagattgtcgtacggggaagatttacagatggactgggatggaaggggaaggctgcttgtgaaattgtcacctgtgtatgctggaaaaacatgcgggctgtgtgggaattacaatgggaaccagggagacgattttctgacaccttctgggctcgccgaacctagagtggaagattttggaaacgcctggaaactccacggagattgtcaagatctgcagaagcagcatagtgatccttgtgctctgaatcctcggatgacgcgatttagtgaagaagcctgtgccgtgctgactagtcctacattcgaagcctgtcatagggctgtttctccacttccttacctgcgaaattgccgatatgatgtctgttcttgttcagacgggcgagaatgtctctgcggggccctcgcatcctatgctgccgcttgtgccgggcggggggtacgcgtcgcatggcgggaaccaggacgatgcgaacttaattgccctaaaggacaggtgtatctacagtgcgggactccgtgcaatctcacgtgtagaagtctctcataccctgatgaggagtgcaatgaagcttgtctggaagggtgtttctgtccacctggactatacatggatgaacgcggggattgtgtgcccaaagcacaatgtccctgctactatgatggagaaatctttcagcccgaagatatcttctcagatcaccatacaatgtgttattgtgaagatgggttcatgcactgtactatgtccggggtccctgggtcgcttcttccagatgccgtgctgagtagtccactctcccacagatcaaaacggtctctcagttgccggcctccaatggtgaaattagtctgtccggccgacaatctgcgagctgaggggctggaatgcactaaaacatgtcagaattatgatcttgaatgcatgtccatggggtgtgtgagtggatgtctctgtccacctgggatggttaggcatgaaaatcggtgcgtggcactggaacggtgtccctgttttcatcagggaaaagaatatgccccgggggaaacagtgaaaatagggtgtaacacttgtgtgtgtcaggatcggaaatggaactgtacagatcatgtttgcgatgccacttgttctactattggaatggcccattatctcacttttgatggactaaagtatctctttcctggagaatgccagtatgttttagttcaggactattgcggatctaatcctggaactttcagaatactcgttggaaacaaagggtgtagtcatccttcggtaaagtgcaagaaacgggtgactattcttgtggagggaggagaaatagaacttttcgatggggaagtgaatgtgaaacgacccatgaaggatgagactcattttgaagtagtcgaatctgggcggtatattattctactcttgggaaaagctttgtccgttgtttgggataggcatctgtctatctcagtggtcttaaaacagacttatcaggaaaaagtgtgcgggttatgtgggaactttgatggaattcagaacaatgatctcacttcgtcaaatttacaggttgaggaggatcctgtagacttcggaaactcctggaaagtatcttctcagtgtgccgatactaggaaagtcccactggatagttcacccgctacatgccataataacatcatgaaacagacaatggttgattcttcttgtagaatcctcacttctgatgtattccaggactgcaataaactagtcgatcctgagccatatcttgatgtgtgcatctacgatacttgttcctgcgaatcaatcggggattgtgcctgtttctgtgatactattgcagcctatgcccacgtgtgtgctcagcacggaaaagtagtaacatggagaacagcgactctgtgtccacaatcgtgtgaagaacgcaacctgcgggaaaacggatacgaatgcgagtggagatacaacagttgcgctcctgcctgccaggtgacgtgccagcatcccgagcctctcgcatgtcccgtccagtgtgtagaggggtgtcacgcccattgtccccctgggaaaatcctggacgaactactacaaacttgcgtagacccagaagactgccccgtttgcgaagtagctgggcgccgcttcgcctctgggaaaaaagtcacacttaatccttctgatcccgaacattgccagatctgccactgtgatgtggtcaatctcacatgtgaggcctgtcaggaaccaggggggctagtggttccccctacagatgcccctgtatcgcctacaactttatatgtggaggatatttctgaaccccccctccacgatttctattgctctagactactggatctcgttttcttgctggatgggtcttctcgcctgtcagaagcggagtttgaagtgctcaaggcattcgttgtggatatgatggaacggctcaggatatcgcagaaatgggttcgggtggccgtggtagaatatcacgatggaagtcatgcctacatcgggctgaaagataggaagcggccatcagagttgcggaggattgcatcacaagtgaaatatgccggatctcaggtcgcctctacgtccgaagtcttgaaatacactttgttccagatattcagtaaaatagaccggcccgaagcttctcgcatcactctgcttctcatggcatcccaggaacctcagagaatgtctcgaaatttcgtgcggtacgttcagggactcaaaaaaaagaaagtgatcgttattccagttggaatcggacctcacgctaatttgaagcaaatccgactaatcgaaaaacaggcccctgagaataaagcctttgtgctgtcctcagtggatgaattagaacagcagagggatgaaatcgtatcttatctctgcgaccttgccccagaagcgccacctcccacactgcccccagacatggcacaggtgactgtgggacccgggctgttgggggtgagtactctcgggcctaagcgtaattccatggtgctggatgtggcgttcgtactggaaggatccgataaaatcggagaagcagattttaaccggtccaaagaatttatggaggaggttattcagcggatggacgtgggacaggatagtatacacgtaacagtactgcagtattcatacatggtaacagtagaatatcctttctcagaagctcagtctaaaggggatatacttcagcgcgtgcgggaaatccgctatcagggagggaaccggacaaatacaggactggctttacgatatctgtctgatcattccttcctggtctcccagggagatagagagcaggccccaaatctcgtgtacatggtgactgggaatccagcatctgatgaaatcaaacgactccccggggatatccaggtcgtaccaataggggttggacccaacgcgaatgtccaggaactggagcgaatcgggtggcctaatgctcctatactaatacaggatttcgaaacactacctagagaagcccccgatctcgtccttcagagatgttgttctggggaagggcttcagatccctactctgagtccagctcctgattgttctcagccccttgatgtaatcctgctcctcgatgggtcatcttcctttcccgcatcctacttcgatgagatgaaatcttttgcaaaagctttcatcagtaaagctaacataggaccccgactcacacaggtatctgttctgcagtatggatctataacaactattgatgtcccatggaatgtggtgccagaaaaagcccacctcttgagtctcgtggatgtgatgcaaagagaaggggggccttcccagataggagacgccctagggttcgctgttcgctatctgacttctgagatgcatggggcacggcctggggcatccaaagccgtggtgatcttggtcacagatgtgagtgttgattcggtagatgccgcagcagatgccgctaggagtaatcgcgtcacagtctttcccataggaatcggagatagatatgatgctgcacagttgaggatcctcgccgggcccgccggggacagtaatgtcgtgaagcttcagcgaatcgaagatctgcctacgatggtaacattggggaactcatttctgcacaaactctgctcaggattcgtcaggatatgtatggacgaagatgggaatgaaaaacgaccaggagacgtttggactctgcccgaccagtgtcatactgtgacttgccagcccgacgggcagactctcctaaaatcacatagggtcaattgtgatcgggggctcaggccaagttgccctaactcacagtccccagtaaaagtcgaagaaacttgtggatgtagatggacatgtccctgtgtttgtacaggaagttctacaagacatattgtgactttcgacggacagaattttaaactcacagggtcttgctcatatgtgctgtttcagaataaagaacaggatttagaggtaatcttgcacaacggagcatgctccccaggagctaggcagggatgcatgaaaagtatcgaggtgaaacactctgcactgagtgtcgagctacattctgatatggaggtgacagttaatggaaggctggtgagtgtaccctatgtaggggggaatatggaggtgaacgtttatggggctattatgcatgaagtccgcttcaaccaccttgggcatatctttacttttactccccagaataacgagtttcagctgcagctctctcctaagacgtttgcctcaaagacttatgggctctgcggaatttgtgatgaaaacggggcaaacgatttcatgctccgggacggaactgttacaacagattggaaaactcttgtacaagaatggacagtgcagagacccggacagacttgccagcctatcctcgaagaacagtgtctcgttccagatagttcccattgtcaggtgctcctgctaccactttttgcggaatgccacaaagtgctggcccccgcaactttttacgccatctgtcagcaggactcatgccatcaggaacaggtttgtgaagttatcgcctcctatgcccacctttgtaggactaatggggtttgtgttgattggagaacacctgacttttgtgctatgtcctgtccaccttccctagtgtacaaccattgcgaacatgggtgccctcgacactgcgacgggaatgtctcctcttgtggagatcacccatccgaaggatgcttttgtcccccagataaggtaatgcttgaaggatcttgtgtgccagaagaggcctgtacacagtgtattggagaagacggggtccagcatcagttcctcgaagcttgggtgcccgatcatcagccttgtcagatatgcacgtgtctatccgggaggaaagttaactgcactacacagccttgccccactgccaaagcccctacttgtgggctctgtgaagtcgcaaggctcagacagaacgcagatcagtgctgcccagaatacgaatgtgtctgcgatccagtttcctgtgatttacctcctgtgcctcactgcgaaagggggcttcagcccactctgactaaccccggagaatgtagaccaaatttcacatgtgcctgccggaaagaagaatgtaaaagagtctctcctcccagttgcccccctcatagattgcctactcttcggaaaacacagtgttgtgatgaatacgaatgcgcctgcaactgtgtaaattctacagtgtcatgcccactgggatatctcgcttctacagcgacaaacgattgcgggtgcacaacgactacttgtctccctgataaagtgtgtgtccaccggtcaactatttatcctgtggggcaattttgggaagaaggatgcgatgtttgtacttgcactgatatggaagatgcagtgatgggattacgtgtagctcagtgttctcagaaaccctgcgaagattcctgtagaagtggatttacatacgtcctgcacgaaggggagtgctgtgggagatgcctgccttctgcttgtgaagtggtgacagggtccccaagaggagattctcagtctagttggaagtcggtggggagtcagtgggcatcccccgagaacccatgcctaattaatgaatgtgtgagggtcaaggaagaagtatttatccagcagcgcaacgtgtcttgtccccagttagaagtacctgtatgtccttccgggttccagcttagttgtaaaacttctgcctgctgtcccagttgcagatgcgagagaatggaggcgtgtatgcttaacggaactgtgatcgggcctgggaagacagtaatgatcgatgtctgtacaacatgccgctgtatggtccaagtgggggttatctcagggtttaaactggaatgcaggaaaactacatgtaacccatgccccttagggtataaagaagagaataacacaggggaatgttgcggacggtgcctgcccactgcctgtactatacagctcaggggggggcagatcatgactctcaaacgcgatgaaactcttcaagacgggtgcgatactcatttttgcaaagtgaatgaaaggggagaatacttttgggagaaaagggtgactgggtgtcctcctttcgatgaacataagtgtcttgcagagggagggaaaataatgaaaatcccgggaacttgctgcgatacatgcgaagaaccagaatgcaacgatattacagcgcgcctacagtacgtgaaggttggatcttgcaaatctgaggttgaagtggatatacattactgccagggaaaatgtgcttcaaaagccatgtacagtatagatatcaatgatgttcaggatcagtgctcctgttgctctcctacacggactgaaccaatgcaagttgccctccactgtactaacgggtctgtagtttatcacgaagtgcttaacgccatggaatgcaaatgctcaccaaggaaatgctctaaa

SEQ ID NO: 21321 - DNA, 8439 bp, synthetic construct
  misc_feature 1..8439: note = source = /note="Description of Artificial Sequence: Synthetic coding sequence"
  source 1..8439: mol_type = other DNA
atgattccggcgcgttttgccggcgtcctcctcgcactggccctgatcctgccgggaactctgtgtgcggagggaaccagaggtcggtcaagcactgcaaggtgctccctctttggatccgacttcgtgaacactttcgacggatccatgtactcgttcgctgggtactgctcctacctgttggccggaggatgccagaaaaggagctttagcatcatcggtgatttccagaacggaaaaagagtgtccctttccgtgtaccttggagaattctttgacatccacttgttcgtcaatgggactgtcactcaaggtgaccaacgcgtctcaatgccatacgcatccaaaggactctacctcgagacggaagctggctactacaagctgtcgggagaagcctacggattcgtggcgcgcatcgacggctctggcaacttccaagtgctcttgtcagatcgctacttcaacaagacttgcgggctctgcggtaactttaacattttcgcggaggacgacttcatgactcaagaaggaacgctcacttccgatccatacgacttcgctaactcgtgggcactctcatccggagagcagtggtgtgaaagagcttcgccgccgagctcgagctgtaatatctcgtctggtgaaatgcagaaggggctttgggagcaatgtcagttgctgaagtcaacttcagtgttcgcgagatgccacccgctggtcgacccagagccatttgtcgcactgtgtgagaaaactctgtgtgaatgcgcgggcggtctggagtgcgcctgtccagcgctcctcgaatacgcccggacttgcgctcaggagggaatggtcctgtatggatggaccgatcactccgcatgctctccagtttgtcctgctggaatggaataccgccagtgtgtctccccgtgcgctcgcacctgccagtccctgcacataaatgagatgtgccaggaacgctgtgtcgacggatgttcatgcccggagggacagcttctcgacgaagggctctgtgtggaatccaccgaatgtccatgtgtgcactcaggtaaacggtacccacctggaacttcgttgtcgcgcgattgcaacacctgcatctgccgcaactcccagtggatttgtagcaacgaggagtgcccgggcgaatgtcttgtgaccgggcaatcacacttcaagtccttcgacaaccggtactttacgtttagcggcatctgtcagtacctgctggcgcgcgattgccaagatcatagcttctccatcgtgatcgagactgtgcaatgcgcggatgatcgagacgccgtctgtaccagatctgtgacggtgcgcctgccaggcctccataattcgttggtgaagctgaagcatggcgcgggggtcgctatggatggacaggacgtgcagctgccattgctcaagggggatctgcggatccagcacaccgtgactgcgtcagtgcggctgtcgtacggcgaagatcttcagatggattgggacggacgcggccgcctcctggttaaactgtccccggtgtacgcgggaaagacttgtgggctgtgcgggaactacaatggaaaccagggggatgattttctgacccccagcggactcgctgagccaagggttgaggattttggaaacgcatggaaattgcacggtgactgccaagatctccaaaagcagcattccgacccctgcgccctcaatccgcgcatgacccggttcagcgaagaagcatgcgcggtgctcacctcaccaacgttcgaagcctgtcacagggccgtctcgccactgccctacctgcgcaactgccggtacgatgtctgtagctgcagcgacgggcgcgagtgcctctgcggcgcactggcctcgtacgcggccgcatgcgcaggccgcggcgtgcgggttgcttggcgcgagccaggtaggtgcgaacttaattgcccgaagggccaggtgtacttgcaatgcggaacgccgtgcaacctgacttgccgttccctctcttacccggacgaggagtgcaatgaggcatgtctggaaggatgcttctgcccgcctggattgtacatggacgagcgaggcgactgcgtgcccaaggcccaatgtccgtgttactacgatggtgagatttttcagccggaggatatcttctccgaccaccacaccatgtgttactgcgaagatggattcatgcactgtactatgtcgggtgtcccaggttcgctgctgcccgacgctgtgctgtccagccccctctcacaccggtccaagcgctccctcagctgccggcccccgatggtcaaacttgtctgccccgctgacaacctcagagctgaagggcttgagtgtaccaagacttgccaaaactatgatctggagtgcatgtcgatgggatgcgtgtcgggatgcctgtgcccaccgggcatggtcagacacgaaaataggtgtgttgccctggaacgttgtccatgctttcaccagggcaaggaatacgcccccggggagacggtgaaaatcggctgtaatacctgcgtgtgccaggaccgcaagtggaattgcactgaccatgtttgtgatgctacttgctcaaccataggaatggcccattacctcacgttcgacggtctgaaatacctctttccgggagagtgccagtacgtcctggtgcaagactactgcggatcaaatcccggtaccttccgcatccttgtgggtaacaaaggttgcagccacccatcggtgaaatgtaagaagcgcgtgactatcctggttgaaggaggcgagattgagctgtttgatggagaagttaacgtcaaacgccccatgaaggacgaaacccatttcgaagtcgtggaatccggacgctacatcatcctgttgcttggaaaggcactgtcagtggtctgggaccgccatttgtcgatttcggtggtgctgaagcagacctaccaggagaaggtctgcggcctttgcggaaacttcgacggtatccaaaacaatgacctcacctcctcgaatctgcaagtcgaggaagatccggtggatttcggaaactcatggaaggtcagctcccaatgcgccgacaccaggaaggtcccgctggattcatcgccggcaacctgccataacaacattatgaagcaaactatggttgactcgtcgtgccgcatcctgacctcggacgtctttcaagactgcaacaaattggtggacccagaaccctatctggacgtgtgcatctacgacacctgcagctgcgagtccatcggagactgcgcgtgcttctgtgacaccatcgcggcctacgcccacgtgtgcgctcagcacggaaaagtggtgacttggcgtactgccaccctgtgcccgcagtcgtgtgaagagcggaatctgcgggagaacgggtatgaatgcgaatggcggtacaactcatgcgcccccgcgtgccaagtgacctgccaacatcctgaaccgctggcatgtcccgtgcagtgcgtggagggctgccacgcccactgccctcccggcaagatactggacgaactgctccagacctgcgtcgatccggaggattgtccggtctgcgaggttgccgggcggagattcgcgagcggaaagaaggtcaccctgaacccgtctgatcctgagcattgccaaatctgtcactgcgacgtggtgaacctgacgtgtgaggcctgccaggaaccgggcggactggtggtgccaccgaccgacgccccagtctcaccgaccaccctgtacgttgaggacatttcggaaccaccactccacgatttctactgctcgagactcctggatctcgtgttcctcctggacgggtccagccggctgtccgaagcggagttcgaggtgctgaaagcattcgtcgtggacatgatggaaagactcaggatctcacagaaatgggtcagagtcgctgtggtcgagtaccacgatggcagccatgcgtatatcggtttgaaggatcgcaagcgaccgagcgagctgcgccgcatcgcttcgcaagtgaaatacgccggcagccaggtggcgtcgacttccgaagtcctcaagtataccctgttccaaatcttctcaaagattgaccggccggaggcatcaaggatcaccctcttgcttatggcgtcgcaggaacctcagcgaatgagcagaaactttgtccgatacgtgcagggacttaagaagaaaaaggtgatcgtgatcccagttggaattgggcctcatgctaatctgaaacagatcaggctcatcgagaagcaggctccggaaaacaaggccttcgttttgtcgtcggttgacgaactggagcagcaacgcgacgagatcgtgtcttacctctgcgacctggctccggaggcaccgccgcctacgctcccccctgacatggcacaggtgactgtgggaccgggattgctgggcgtgtcgacgcttggtccaaagaggaattcgatggttctggacgtggcgttcgttctggagggtagcgataagatcggcgaagccgacttcaaccggtcaaaggaattcatggaagaggtcatccagcgcatggacgttggtcaggatagcattcatgtgactgtgctccagtactcgtatatggtgaccgtcgaatacccattcagcgaggcccagtccaagggggatatcctccaaagggttcgggaaatcaggtaccaaggtgggaacagaactaatactggcttggcacttagatacttgtctgaccatagcttcctcgtgagccagggagacagggagcaagcccctaaccttgtctacatggtgaccggcaacccggcgtccgacgagattaaacggctcccgggcgacatccaagtggtcccgatcggagtgggacctaacgcaaacgtgcaggaactggagcggattgggtggccgaatgcacctatcctgatccaggacttcgaaacccttccgcgggaagccccggacttggtcctccagagatgctgcagcggggaaggactgcaaatccctactctttcaccggctccggattgtagccagccgctggacgtgatcctcctcctcgatggatcatccagcttcccggcctcgtactttgacgagatgaaatccttcgccaaggctttcatctcgaaggccaatatcggaccacgtctgactcaggtgtcagttctccagtatggttccatcaccaccatcgatgtgccgtggaacgtcgtgccggaaaaggcacatctgctttcgctggtcgatgtgatgcaacgggaaggcggaccctcacagattggagacgcccttggatttgccgtgcggtacctgacttcggaaatgcacggagcgaggccgggagccagcaaggcggtggtcatcctggtcaccgatgtgtcggtggactctgtggacgcagccgccgacgcggcgcgctccaatcgggttaccgtgttcccgatcggaatcggagacaggtacgacgcagcccagctgagaattctggccggaccggcaggggactccaacgtggtgaagttgcagcgcatcgaggacctgccaactatggtcactctcggcaattcgtttcttcacaagctgtgttccgggtttgtgcgaatctgcatggatgaggacggcaacgagaaacgcccgggagatgtgtggaccttgccggatcaatgtcacactgttacctgccagccagacggacaaactctgctgaagtcgcaccgggtgaattgcgatcgggggctgcgaccatcgtgtcctaattcacagagccccgtcaaggtcgaagagacttgcgggtgccggtggacctgtccttgtgtgtgcaccggctcctccacccgccacatcgtgacgttcgatggacaaaacttcaagctgaccggatcctgcagctacgtgctcttccagaacaaagaacaagacctcgaagtgatcctccacaatggcgcctgtagcccaggagcccgccaaggctgtatgaaatccattgaagtgaagcactccgcgctgtcagtggaactgcattcagacatggaagtcaccgtcaatggccggctggtgagcgtgccatacgttggaggaaacatggaagtgaatgtgtacggggctatcatgcatgaggtccgcttcaaccacctgggtcacatctttaccttcaccccgcaaaacaatgagttccagctgcaactgagcccaaaaaccttcgcctccaagacgtatggactttgtgggatctgcgacgaaaacggcgcgaatgatttcatgctcagagacggcactgttaccactgactggaaaacgctggtccaagagtggaccgtgcaacgcccgggacagacctgtcaacccatacttgaagagcagtgcctcgtgccggactcgtcccattgccaagtgctgctcttgccgctcttcgcagagtgccacaaggtgctggcgccggcgaccttttatgccatctgccagcaagattcatgccatcaagaacaagtgtgcgaggtcatcgccagctacgcccatctgtgcagaacgaacggggtgtgcgtggactggcgcactccggatttctgcgccatgagctgcccgccatcgctcgtgtataatcactgtgaacacgggtgcccgcggcactgcgatggaaacgtctcctcctgcggtgaccaccctagcgaaggctgcttttgccctcctgacaaagtgatgctcgagggaagctgcgtccccgaagaggcatgcactcagtgtatcggcgaagatggagtgcagcatcagttcctcgaagcatgggtccccgaccatcagccctgccagatctgtacttgtctctcgggacggaaagtgaactgcactacgcaaccgtgcccgactgccaaggcgccaacctgcggtttgtgtgaagtcgcccggctgcgacagaatgcggatcagtgctgtccggagtacgaatgtgtgtgtgaccccgtctcatgcgatctgccgccagtgccgcactgcgaaagaggactgcaacctaccctgaccaatccaggggagtgcaggccaaacttcacttgcgcgtgccgcaaggaagaatgcaaacgggtttccccgccttcctgtccacctcatagactcccgactttgcgcaagacgcagtgctgcgacgaatacgagtgcgcctgcaactgcgtgaacagcactgtgagctgccctctgggctacctggcctcgaccgctaccaatgactgcggatgtactaccactacctgcctccctgacaaggtgtgcgtccaccgttcaactatctacccagtgggacaattttgggaagagggctgcgacgtgtgtacttgcaccgacatggaggacgccgtgatgggcttgagagtggcgcagtgctcgcagaagccgtgcgaggattcgtgtcggtcgggattcacgtatgtgctgcacgaaggagaatgctgcggacggtgcttgccctccgcgtgcgaggtggtgacgggaagcccaagaggagattcacagtctagctggaagtcggtcggatcccagtgggcctctcccgagaacccgtgtctgatcaacgaatgtgtgagagtcaaggaagaagtgttcatacagcagcgcaatgtctcctgtccccaactggaagtgcctgtgtgcccttccggattccagctgagctgcaagacttccgcctgttgcccttcctgccggtgcgagcggatggaagcctgtatgttgaacggaaccgtgatcggtccgggcaagaccgtgatgatcgatgtgtgcacgacgtgccggtgcatggttcaggtgggagtcatctcgggcttcaaacttgaatgccgcaagaccacttgcaatccttgtccactgggatacaaggaggaaaacaataccggagagtgttgtggtcggtgcctgccgactgcgtgcaccattcagctgcggggtggccagatcatgactctcaagagggatgaaactctccaagatggatgcgacacccatttttgcaaagtcaacgaacggggagaatacttctgggaaaagcgggtgaccggatgcccaccgttcgacgaacacaagtgcctcgcggagggaggtaagattatgaagattccaggaacttgctgcgatacttgtgaggagcctgaatgtaatgacatcacggcgcggcttcagtatgtgaaggtcggatcgtgcaagtccgaagtggaagtcgatatccattactgccagggcaagtgtgcaagcaaggcaatgtactcgatcgatatcaacgatgtgcaggatcagtgctcttgctgttcccctactcgcactgaacctatgcaagtcgccttgcactgcaccaacgggtcagtggtgtaccatgaggtgctgaatgctatggaatgtaagtgctcccctcggaaatgctcaaaa

SEQ ID NO: 21322 - DNA, 8439 bp, synthetic construct
  misc_feature 1..8439: note = source = /note="Description of Artificial Sequence: Synthetic coding sequence"
  source 1..8439: mol_type = other DNA
atgatccccgcccgttttgcgggggtactgctggccctcgcactgatcttgccaggtactctctgcgctgaaggaacgcgcggccgctcgagcactgcccgatgctcactcttcggatccgatttcgtgaacactttcgacggatccatgtactcattcgccggatactgctcttacttgctcgccggcggatgccagaagagatcgttctccattatcggcgattttcagaacggaaagagagtgtcgctttcagtgtacttgggagaattcttcgacatccatctgttcgtcaacggaaccgtcacccaaggggaccagcgggttagcatgccctacgcttccaaaggactttacctggaaacggaagctgggtactacaagctgtcgggggaagcgtacgggttcgtggcacggatcgatggaagcggaaatttccaggtactcctctcagacagatacttcaacaaaacctgtgggctgtgcggaaatttcaatatcttcgcggaggacgatttcatgacccaagaaggtactctgaccagcgacccatatgacttcgcaaattcgtgggctctgtcatcaggcgaacagtggtgcgagcgggccagcccgcccagctcttcctgcaacatctctagcggagagatgcagaagggtctttgggaacagtgccaactgttgaagtcgacgtccgtattcgcacgctgccatcctctggtggacccggaaccattcgtggcactgtgcgagaaaacgttgtgcgaatgcgccggaggcctcgaatgcgcttgcccggcccttctggagtatgcccgtacctgcgcccaggagggcatggtgctgtacggctggactgaccattcggcttgctccccggtatgcccagccggcatggaatacaggcaatgtgtctcgccgtgcgctagaacttgccagtcgctgcacatcaacgaaatgtgccaggaacgctgcgtcgacggctgctcctgccccgagggtcagctgttggatgaaggtttgtgtgtggagtcaaccgaatgcccgtgtgttcatagcggaaagcgctacccaccggggacttccctgtcacgggattgcaatacctgcatctgccgcaattctcaatggatctgcagcaacgaagaatgcccgggtgagtgcctcgtgaccggacagagccactttaagtcattcgacaaccgctacttcactttctccgggatctgccagtacctgctggccagggattgccaggaccatagtttttccatcgtgatcgaaaccgtgcagtgcgcagatgaccgcgacgcggtctgcactaggtccgtgaccgtgcgcctgccaggacttcataacagcctggtgaagctcaagcacggagcaggggtggctatggacggacaagatgtgcagctgccactgctgaagggtgatctgaggatccagcatactgtcacggcctcagttcgcctgtcctatggcgaggacctgcagatggactgggacggacgagggcggttgctcgtgaaactgtcgccagtctacgcgggcaagacttgcggcttgtgtgggaactacaacggaaaccagggcgacgatttcctcaccccatcgggactcgctgagcctagagtggaagatttcggaaatgcctggaagctgcacggggactgccaagatttgcaaaagcaacactcggacccctgcgcgctcaatccaagaatgacccggttctccgaggaggcgtgcgccgtcctgacctcaccgacttttgaagcatgccaccgcgccgtcagtcctctcccatacctgaggaactgcaggtacgacgtctgctcttgcagcgatggaagggagtgtctgtgtggggccctggcatcatacgccgccgcctgcgccggccgcggcgtaagggtggcatggcgcgaacccggtcggtgcgaactgaactgtccgaagggacaagtctacttgcagtgcggcactccttgcaatcttacttgcagatccctgtcctaccctgacgaggagtgcaacgaagcctgccttgaaggatgtttctgcccgccgggactgtacatggacgagcgcggcgactgtgtgccgaaggcacaatgcccttgctattacgacggggagatctttcagccggaggacatcttctccgaccaccacaccatgtgctattgcgaggatggctttatgcactgtacgatgagcggagtccctggaagccttctgccagacgccgtcctctccagcccactctcgcacagatccaagagaagcctgtcatgccggccgcctatggtgaaactcgtgtgcccggccgataatctgcgcgcggagggactggaatgtaccaagacgtgccagaattatgatctggagtgtatgagcatgggttgcgtcagcgggtgcctgtgtccgccgggaatggttcgccacgaaaaccggtgtgttgcactcgagagatgcccttgcttccaccagggaaaggaatacgcgcccggcgagactgtgaagatcggctgcaatacttgtgtgtgtcaggataggaagtggaactgcactgaccacgtgtgtgatgcaacctgttccacgatcggaatggcacactacctgaccttcgacggcctgaaatacctcttcccgggagaatgccagtacgttctcgtccaggactactgcggatctaatccagggactttccggatccttgtggggaacaaaggctgctcgcatccatcggtgaaatgcaaaaagcgggtcacgatcctggtcgaaggaggagagatcgagctgttcgacggcgaagtgaacgtcaagcggccgatgaaggacgagactcactttgaggtggtggaatcaggaaggtacatcatcctgcttcttggaaaggcgctgagcgtcgtctgggatcgccatctgtccatctcggtcgtgttgaagcagacttaccaggaaaaagtgtgcggactgtgcggaaacttcgatggcatccagaacaacgacctcacttcgtcgaacctccaggtggaagaagatcccgtggactttgggaactcctggaaggtgtcctcccaatgcgcggataccaggaaggtgccgctggatagctcaccggcaacttgccataacaacatcatgaaacagacgatggtggatagctcgtgcaggatcctcacctccgacgtgttccaagactgtaacaaactcgtcgatccggagccctacctggacgtgtgcatttacgatacgtgctcatgtgaatccattggagattgcgcttgcttctgtgacaccatcgcagcgtacgcgcatgtgtgtgcccaacacggaaaagtggtcacgtggcgcaccgccactctgtgtccgcagtcatgcgaggaacggaacctcagagagaacgggtacgagtgtgagtggcggtacaattcctgtgccccggcgtgccaggtgacctgtcaacatccagagccgctggcttgcccagtgcaatgtgtggaaggatgccatgctcactgccctccgggtaaaatcctggacgaattgttgcaaacttgcgtggatccagaggattgcccggtgtgcgaagtggctggacggcgctttgccagcgggaaaaaggtcaccctcaacccttccgacccagaacactgccaaatctgtcattgcgatgtcgtgaacctgacctgcgaggcatgtcaggaacctggaggtttggttgtcccaccaactgatgctcctgtgtcgcccaccaccctgtacgtcgaagatatctccgagccgccgctccatgacttttactgtagccgcctgctggaccttgtgttcttgttggacggttcgagtcggctgtctgaggcggaattcgaagtccttaaggctttcgtcgtcgatatgatggagaggctgaggatctcgcaaaagtgggttcgtgtcgccgtggtcgaataccatgatggttcgcacgcgtacatcggactgaaggatcgcaaacggccgtcagaactgcgacggatcgcctcacaggtgaagtatgccggatctcaggtggcgtcgacgagtgaagtgcttaagtataccctcttccagattttcagcaagatcgaccgccccgaagcgagccggatcactctgctcctgatggcgtcccaggaaccacagcgcatgtccaggaattttgttcggtacgttcaaggtcttaagaaaaagaaggtcatcgtcattccggtgggcatcgggccacacgctaatctcaagcaaatccggctgattgaaaaacaggccccagaaaacaaggccttcgtgctctcgagcgtggatgaactggagcaacagcgggacgaaatcgtctcgtacctgtgtgacctggccccggaagcccctccgccgaccctgccacctgatatggcccaggtaacggtgggaccaggactgctgggagtgtcaacgcttggaccgaagaggaattcaatggtcctggatgtcgcattcgtccttgagggatccgacaaaatcggagaggctgacttcaaccgctcaaaggagttcatggaagaggttatccagcggatggatgtgggccaggacagtattcatgtcactgtcctccagtactcctacatggtgactgtcgaatacccgttctcggaagcccagagcaagggggacatcctgcaaagagtgagagaaatacggtaccagggagggaaccggaccaataccggactggcattgagatacctctccgaccactcgttcctcgtgtcgcaaggtgaccgtgaacaagcgcccaacctcgtgtacatggtgacgggcaatccggcctcagacgagatcaagcggctcccgggagacatacaggtggtgccaatcggcgtgggccccaatgccaacgtgcaagagctggaacgcatcggttggcctaatgcgccgattctgatccaggattttgaaactctcccaagagaggcgccggatctcgtgctccagaggtgttgttccggagaggggctccaaatcccgaccttgagccccgcgcctgattgctcgcagccgctggacgtcattctgctgctggatggatcctccagcttcccggcttcgtactttgatgaaatgaaatcgtttgcaaaggcctttatctccaaggccaacatcggtccacgcttgacccaagtctcggtcctccaatacggtagcattaccactattgacgtcccatggaacgtggtgccggaaaaagcacacctgctgtccctggtggacgtcatgcagcgggagggaggaccatcccaaatcggggacgctctgggtttcgccgtgaggtacctgactagcgaaatgcacggcgcgcgaccaggagcgagtaaggcagtcgtgatcctggtcaccgacgtttccgtggattcagtggacgcagctgccgacgctgcgcgatcgaatcgcgtaactgtgttcccgatcggcatcggagatcggtacgatgccgcgcagttgaggatactcgccggacctgccggagacagcaacgtggtgaagctccagcggatcgaggatctgccgaccatggtgaccctgggcaatagcttcctccacaaactttgttccggcttcgtgcgaatctgtatggatgaggacggaaacgagaagcgccctggcgatgtgtggactttgcccgaccaatgtcacaccgtgacttgtcagccggatggacagactctgctcaaatcgcaccgcgtgaactgcgacaggggactccgccccagctgtcccaattcacagagcccggtgaaggtcgaggaaacctgcggctgccggtggacctgtccgtgcgtctgcaccggatcatcgacccggcatattgtgacttttgatggccaaaacttcaagctgacggggtcgtgctcgtacgtgttgtttcagaataaggagcaggacctcgaagtcatcctccacaacggggcctgttcccccggagcccggcagggatgtatgaagtccattgaagtcaagcattcggccctgtccgttgagctgcattcggacatggaagtcaccgtcaatggacgcctcgtgagcgtgccatacgtcgggggcaatatggaagtgaacgtgtacggagcgattatgcatgaagtgcgtttcaatcacctgggacacattttcacctttaccccccaaaacaacgagttccagctgcagctctcccctaaaacttttgcctcaaaaacttatgggctctgcgggatttgtgacgagaacggagccaacgacttcatgctcagggacggaaccgttactaccgactggaaaactcttgtgcaagagtggaccgtgcaacggccgggacagacctgccagcctattttggaagaacaatgccttgtgccggactccagccactgccaggtgctgcttcttccgcttttcgctgagtgtcacaaagtgctcgcccctgcaactttttacgctatttgccagcaggactcctgccaccaggaacaggtgtgcgaggtgatcgcctcgtacgcgcacctctgccggaccaatggagtgtgcgttgactggagaactccggatttttgcgccatgtcatgcccgccatcgctcgtgtataatcactgtgaacatggttgccctcgccattgcgatggcaatgtgagcagctgcggcgatcatccgtcggaaggatgcttctgtccacccgataaggtgatgctcgaggggtcatgcgtccccgaagaagcctgcactcagtgcattggcgaggacggggtgcaacaccagttcctggaagcatgggtgccggatcatcagccatgccagatctgtacctgtctgtctggaagaaaagtcaactgtactactcaaccctgccctaccgcaaaggcccctacttgcgggctgtgtgaggtcgcaagactgcggcaaaacgcggaccaatgctgtccggaatacgaatgcgtatgtgacccggtgtcgtgtgatctgccaccggtcccgcattgcgagcgaggtttgcaacccaccctcaccaatccaggcgaatgcagaccaaatttcacttgtgcctgccgcaaggaagaatgtaagagagtgtctccgccgtcgtgtccgccgcaccgcctgccaaccttgaggaaaacccaatgctgtgacgagtacgagtgcgcatgtaattgcgtgaactccactgtcagctgtccactgggctacctggcgtcgaccgcaactaacgactgcggatgcacgactactacgtgccttccggataaggtgtgcgtgcaccgaagcactatatacccggtgggacagttttgggaagaaggctgtgacgtgtgcacttgcaccgatatggaggacgccgtgatgggcctgcgggtggcacagtgctcgcaaaagccatgtgaggacagctgcaggtcaggatttacgtacgtgcttcacgagggtgagtgctgcggccgctgtttgccatccgcctgcgaggtcgtgaccggatcacctagaggcgactcacaatctagctggaagagcgtgggctcgcagtgggcgagccccgagaacccatgcctcatcaacgagtgcgtccgcgtgaaggaggaggttttcattcaacagcgaaacgtgtcgtgccctcagctggaagtccccgtgtgccctagcgggttccagctgtcatgcaaaaccagcgcatgctgcccatcgtgccggtgcgaaagaatggaggcctgcatgctgaacgggaccgtgatcgggcctggaaaaaccgtgatgattgacgtctgcaccacttgccgctgcatggtgcaagtcggagtgatctccggtttcaagctggaatgccgcaagaccacctgtaacccgtgtccactcggatacaaagaagagaacaacacgggcgaatgctgcggtcggtgtctgccgactgcgtgcaccatccagctgagaggaggccaaatcatgaccctgaagcgcgatgaaactctccaggacgggtgcgacacccacttctgcaaggtcaacgagagaggcgaatacttctgggagaaacgggtgaccggatgccctccatttgatgaacacaagtgtctcgcagaaggcggaaagatcatgaagatcccgggaacctgctgtgacacgtgtgaggaaccagagtgtaatgacatcactgccaggctgcaatacgtgaaggtgggaagctgcaaatccgaagtggaggtcgatatccattactgccaaggaaagtgcgcatccaaggctatgtactcaatcgacatcaatgatgtgcaggaccagtgctcgtgctgttcacctacccggaccgaacctatgcaggtggcccttcactgcaccaacggttcagtcgtgtaccatgaagtgctgaacgcgatggaatgcaagtgctcgccgcgcaagtgctcgaaa

SEQ ID NO: 21323 - DNA, 8439 bp, synthetic construct
  misc_feature 1..8439: note = source = /note="Description of Artificial Sequence: Synthetic coding sequence"
  source 1..8439: mol_type = other DNA
atgatcccagctaggttcgctggtgtgcttctggccctggcactgattcttccaggaacgctgtgtgccgaggggacccggggtagatcaagcactgcaagatgctctttgttcgggagcgatttcgtcaacaccttcgacggctctatgtacagttttgctgggtattgtagctatctattagctggtggatgccagaaacgctccttctctatcattggggattttcaaaatggaaagcgtgtctcactaagcgtctatctgggggaattcttcgatatccacttgttcgtaaatgggaccgttacccaaggagaccaaagagtgagcatgccatacgccagtaagggcttgtacctggagaccgaagccggatactataagctgagtggagaggcatatggcttcgtcgcacgcatagacggctcgggcaattttcaggtgttgctgtccgatcgctactttaacaaaacatgtggtttgtgcggaaacttcaacatctttgcagaagacgactttatgacccaggaggggactctcacaagtgatccctacgacttcgccaacagctgggctctgtctagcggagagcagtggtgcgaaagagcgagtccacccagttcctcttgcaacatctccagcggggagatgcagaaaggcctgtgggaacagtgtcagttgcttaagagtacgagtgtgtttgcccgttgccaccccctggtagatcccgaacctttcgtggctctatgcgaaaagactctctgcgagtgtgcgggcggcctggagtgtgcatgccctgcgctcctcgagtacgcaaggacctgtgctcaggaggggatggttttatacggctggacagaccattcagcctgttcgcccgtgtgtcccgcaggaatggaatatagacagtgtgtttcaccttgtgcaaggacctgccagtctcttcacattaacgagatgtgtcaggagaggtgtgtggacggctgttcttgtccggagggtcagttgttggacgaggggctttgtgtcgagagcacagagtgtccttgcgtccatagcggtaagcgttaccctcctggaacttctctctctcgagattgcaatacttgcatttgccgaaattcgcaatggatctgcagcaacgaggagtgccctggagagtgcttggtgactgggcaaagccattttaagtctttcgacaatcgttacttcaccttctccggaatatgtcagtatctgctcgcccgagactgtcaggaccacagcttctccattgtgattgaaaccgtccagtgtgccgatgaccgggacgccgtgtgcactcgctccgtgacagtgcgcctccctggtcttcataattcacttgtgaagctgaagcacggagcaggagtagcaatggatgggcaggacgtccagctgccactgctaaagggtgatctgagaatccagcacaccgtcacagccagtgtgcggctctcttacggagaggacttgcagatggattgggacggccgcggacggttgcttgtaaagttgtccccggtctacgctggaaagacttgtggtctttgcggtaattacaacgggaaccagggcgatgattttctgacacccagcgggctagctgaacctagagtggaagatttcggtaatgcttggaaactccacggagactgccaggacctgcagaagcagcactccgacccgtgtgcattgaaccctaggatgacacgattctctgaggaagcatgtgcggtgttaactagtccaacctttgaagcgtgccaccgggctgtgtcacccctgccataccttcgaaactgcaggtacgatgtttgtagttgcagcgacggcagggagtgcctgtgcggggcgttggcaagctatgctgccgcatgtgccgggagaggggtgagggtggcctggagagaaccaggccgatgcgagctgaactgccctaaggggcaggtgtacctgcagtgtgggactccatgtaacctcacctgcagatccctgagctacccagacgaggaatgtaacgaggcatgtttggagggttgtttttgtccccccggactctacatggacgagaggggggactgtgtacccaaggcccagtgtccatgctactatgacggggaaatctttcagccagaagacattttttcagatcaccatactatgtgttactgtgaagatggtttcatgcactgcaccatgagtggagttccagggtccctgctaccagacgccgtgctgagctcaccactcagccaccgatccaagcggtccctgagctgtcggcctccaatggtgaagctggtatgccctgcagacaacctaagagcggaaggcctggagtgtacaaagacgtgtcagaattacgacctggagtgcatgtctatgggatgtgtgtctggctgcctgtgcccacccggaatggttagacacgagaacaggtgcgtcgcccttgaacgctgcccatgctttcatcagggcaaagaatacgctccaggcgaaaccgttaaaatcgggtgcaatacttgcgtgtgccaggaccgcaaatggaactgtacagaccatgtctgtgatgctacgtgcagtacaattggtatggcccactatctcactttcgatgggctcaagtatctgttcccaggggaatgtcagtatgttctcgtgcaagattactgcgggtccaacccagggactttccggatcctggtgggcaacaagggatgctcccacccttccgtaaaatgtaagaaaagagtaaccatccttgtggaggggggagaaatcgagctgttcgacggagaggtgaacgttaagaggccaatgaaagacgagacgcactttgaggtcgtggaatccggtcgatacatcatcctcctgttgggaaaggccttaagcgtcgtttgggatcgacatctgagcatatccgtagtgttgaaacagacttatcaggagaaagtgtgtggactctgtggaaatttcgacggtatccagaataatgacttgacatcttcaaatttacaagtcgaagaagatcccgttgactttggcaacagctggaaggtgtcatcgcagtgcgctgataccaggaaggtgccactcgattcctcccccgcgacatgccacaataacatcatgaaacagacaatggtggatagctcctgcagaattttgacctcagacgtcttccaggattgcaataagctggtcgatcctgagccatatctggacgtgtgtatctacgatacctgttcttgcgagagcataggcgactgtgcatgtttttgtgacacaatcgcggcatatgcacacgtctgcgcccagcacggcaaggtggtgacctggcgcacagccacattgtgtccgcagagctgcgaggagcgaaacctgagagagaatggctacgaatgcgagtggcggtacaactcctgcgcccccgcctgtcaggttacctgccagcaccctgaaccactcgcctgccccgtgcagtgtgtagagggttgtcacgcccactgtccccccggaaaaatcttggacgagctgcttcaaacctgcgttgacccagaggattgtccagtgtgcgaggtggccgggcggaggtttgccagcggcaagaaggtcacacttaatccctccgaccccgaacattgtcagatttgccattgtgatgtggtgaatctgacgtgtgaggcctgccaggagcctggagggctggtcgtaccacctacagacgctccagtcagtccaaccaccctgtacgttgaggacattagtgagccccctctacatgatttctattgctccaggttattggacctcgtgtttctcctggacgggtcctccagacttagcgaagctgagtttgaagtgctgaaggcctttgttgtagacatgatggagcgccttaggatatcccagaaatgggttagggtcgcagtggtcgaatatcacgacggcagccatgcgtacatcggcctgaaagataggaagcgcccttctgagcttagaagaattgcatcccaggtgaaatacgcgggttcccaggtcgcgtccacgtcagaggtactgaagtacactctgtttcagatcttcagcaaaatagatcgtcccgaggcttcacgtatcaccttgctgctgatggcatcccaagagccccaacgaatgtctcggaacttcgtcaggtacgtccagggcctgaaaaaaaagaaagtaattgtgatcccagtggggatcgggccacatgccaatctcaagcagatccgcctgattgaaaaacaagcgcctgaaaacaaggcttttgtcctcagtagtgttgacgagctggagcaacagcgtgacgaaatcgtcagctatctttgcgatcttgcacctgaagcacctccacctaccctgcccccagatatggcccaggtgaccgttgggcccgggctgctgggagtatcaacactcggcccaaagcggaatagtatggtgctggatgtggcgtttgtgcttgagggctctgataaaatcggggaagccgatttcaatcggtcaaaagagttcatggaggaagtcattcagaggatggacgtcggtcaagattcaatacacgtcaccgtgctccagtactcctacatggtgacagttgagtaccctttctccgaggcccagagcaagggagatatcctccagagagtgagagaaattaggtaccaggggggtaacaggacaaacacgggcttagcccttagatacttgtctgatcattccttcctagtctcgcaaggtgatcgggaacaagcccccaatctcgtatatatggtaaccggaaatcccgcaagcgatgaaataaaaaggctccccggcgacattcaggttgtgcccatcggggtcgggccaaacgcaaacgtgcaggaactggaacggattggctggcctaacgcccccatacttattcaggactttgagaccttacctcgtgaggcccctgacctcgttctgcaacggtgctgctctggcgaaggcttacagatacccacactctctccagcacctgactgcagccagcctctcgatgtgatcctgcttctcgacgggtcttcgtccttccctgcctcctacttcgatgagatgaagtcgtttgccaaggcgttcatcagcaaggcgaacatcggaccccggcttacccaggtcagcgttctgcagtatggtagcataaccacgattgacgtcccatggaacgtggtgcccgagaaggcgcacttgttatccctcgttgatgtgatgcagagagagggtggaccatcacaaataggtgatgccttaggattcgccgtccgctacttgacgtcagaaatgcatggtgctagacccggcgcatcaaaagccgtggtaatcttggtcaccgatgtaagtgtggacagcgttgacgctgccgccgatgccgcgcgttccaaccgtgtaaccgtgtttccgatcggaatcggcgataggtatgacgccgcccagctgcgcatactcgctggaccagccggagacagtaacgtggttaaactgcagcgcattgaagacctccccaccatggtaacattgggtaacagctttctccacaagctctgcagcggtttcgtcaggatttgtatggacgaggatggcaacgaaaagaggcccggagatgtctggaccttgccagatcagtgtcacactgtaacctgtcaacctgatggacagactctgctgaagagtcaccgggtcaactgtgaccgaggactccgccctagttgtccgaacagccagtctccagtgaaggtggaggagacatgcggctgtcggtggacctgtccttgcgtttgtactggctcatcaacccggcacatcgtgacattcgacggtcaaaacttcaaactgactgggtcatgctcctatgtgttgtttcagaacaaggaacaggatttagaggtcatcctgcacaatggggcttgcagccccggggcccgacagggatgcatgaagtccattgaagtgaagcacagcgctctctctgtggagctgcattctgacatggaggtcaccgtgaatggccggctggtgtcagttccatacgtaggagggaatatggaagtcaacgtttatggcgccattatgcatgaagtccgattcaatcatctgggccacatcttcacatttaccccccagaataacgagtttcagcttcagctaagtccaaaaacttttgcctctaagacttacggcctgtgtggtatctgcgatgaaaacggcgctaacgattttatgttgagagatggtactgtcaccacagattggaaaactttagttcaggaatggacagtacagagaccgggtcagacctgccagccgattttggaggaacagtgtctggtgcctgacagctcccattgccaagttcttctcttgccactgttcgccgagtgccataaggtgctcgctcccgctactttctatgctatttgccagcaagattcctgtcaccaggagcaagtgtgcgaggtgatcgcttcatatgcccacctttgtagaacaaacggcgtgtgcgttgattggcggaccccagatttttgtgccatgtcttgtcctccctctctcgtctataatcactgcgagcacgggtgcccacgccattgcgatggcaacgttagctcatgtggcgaccatccatctgagggctgcttttgtccaccagataaggtgatgctggagggttcatgtgtcccggaggaggcctgtacccaatgtatcggcgaagacggcgttcaacaccagttcctggaagcatgggtcccagatcaccagccgtgtcagatctgcacgtgtctctccggaaggaaggtgaactgcacaacacagccctgccccacagctaaagctcccacttgtggattgtgtgaagttgcccggctgaggcaaaacgccgaccagtgttgccccgagtatgagtgcgtctgtgaccccgtttcttgtgatttgcctccagtccctcattgtgagaggggcctgcagcccacactgactaaccccggcgagtgccggccaaactttacctgcgcttgtcgcaaggaggaatgtaagagggtaagtcctccttcgtgtccgcctcacagactgcccacactccgtaaaacacagtgttgtgacgaatacgaatgtgcatgcaactgcgtgaactctaccgttagttgccccctcggttatctcgcgtccacagccacaaacgattgtggctgcacaacaactacctgtttaccagataaggtatgcgtgcataggagcaccatatacccggtgggtcagttctgggaggagggatgtgacgtgtgtacctgtactgatatggaggacgccgtgatggggctgcgcgtggcgcagtgctctcaaaaaccctgcgaagattcctgtagaagcgggttcacatacgttttgcacgaaggagaatgttgcggccggtgtctgccatcagcttgcgaggtggtaacgggtagcccccgcggggacagccagtcctcatggaaatcagtgggtagccaatgggcgagtcctgagaatccgtgcctaattaacgaatgtgtacgggtaaaggaggaagttttcatacagcaacgaaacgtgtcttgtccccagcttgaggtcccagtgtgcccgtccggctttcagctcagctgtaagacgagcgcgtgctgcccctcgtgtagatgcgaacgtatggaggcctgtatgctgaatgggacagttattgggcctggaaagaccgtcatgattgacgtctgtacaacctgtaggtgtatggttcaggtgggcgtgatcagcgggttcaaactggagtgcaggaagaccacttgcaatccatgtcctcttggatataaggaggagaacaataccggcgaatgctgtggtcgctgtctgccaaccgcctgtactattcagctgaggggcggccagatcatgaccttgaagagggacgagacattgcaggacggatgcgatacgcatttttgcaaagtgaatgaacgtggagagtacttctgggagaaacgagtcactggctgtccaccctttgacgagcataagtgcctcgccgagggtggtaagatcatgaagatccccggtacatgctgtgacacttgtgaagagcctgagtgcaacgacattacggcacgactgcaatacgtaaaggtgggcagttgtaaaagtgaggtagaagtcgacatccactactgccaggggaaatgcgcctctaaggctatgtacagtatcgatattaacgatgtccaggatcagtgtagttgttgctcccctacacgaaccgagccaatgcaggtggcattgcattgcactaacggctctgtagtctaccatgaagtactgaacgcaatggaatgtaagtgctcacctcgcaaatgttccaag

SEQ ID NO: 21324 - DNA, 8439 bp, synthetic construct
  misc_feature 1..8439: note = source = /note="Description of Artificial Sequence: Synthetic coding sequence"
  source 1..8439: mol_type = other DNA
atgatccccgcccgatttgcaggtgtgctattggccctcgccttgatcttgccgggtaccctgtgcgcggagggaacgcggggccgctcctccaccgcacgctgcagtctttttgggagcgactttgtgaatacctttgatggctcaatgtatagcttcgcaggatactgctcgtacctactcgctggcggctgccagaagcggtctttctccataattggcgacttccagaatggcaaaagagtgtccctgtccgtgtacctaggagagttcttcgatatccatctgtttgttaacggcacagtgactcaaggagaccagcgggtgagcatgccatatgcatccaagggcctgtacctggagaccgaggcaggctactataagttgtctggcgaggcgtacggcttcgttgctagaatcgacgggtcaggaaattttcaagtcctcctctccgatcgttacttcaacaaaacatgtggcttgtgcggcaacttcaatatattcgccgaggacgatttcatgacacaagaggggacgttgacttcggacccctacgatttcgcgaacagctgggctttgagcagcggcgaacagtggtgtgaacgtgcctctccaccgtccagcagctgtaacatttcgagtggagagatgcagaagggcctgtgggagcagtgccagctcttgaagtccacgtcggttttcgctcgctgccatccattagttgacccagagcccttcgttgccttgtgcgagaagacactgtgtgagtgcgccggcggactggagtgtgcctgccccgccttactggaatacgctcgcacatgcgcacaagagggcatggtgctctatggctggaccgaccactcggcctgttcccccgtgtgtccagctggcatggagtaccgacagtgtgtatcaccgtgcgcccgtacctgtcagtcgctgcatatcaacgagatgtgtcaagaacggtgcgtcgacggttgcagctgccccgaaggccagctgctagatgagggcttgtgcgtggaatccacggaatgtccttgcgtgcactctggaaagcgttaccctcctggaacgtcgctatcccgcgactgcaatacctgcatttgcaggaacagccagtggatatgctcgaatgaagagtgccctggcgagtgcctggtgaccggacagagccacttcaaaagtttcgacaatcggtattttacgttttcaggaatctgtcagtacctactggctcgtgactgccaggaccatagctttagcatagtgatcgagaccgtgcagtgtgccgacgatcgagatgccgtatgtacgaggagtgtgactgtcaggctgcccggcctccataatagcctagtaaagctgaagcatggcgcaggtgtggcaatggacggacaagatgtccaattgccgttgcttaaaggagatctgcgcatccaacacaccgtgactgcatcagtgcgcctctcctacggcgaggatttgcaaatggactgggacggtaggggtaggcttctcgtgaagctgagtccggtctacgcgggtaaaacttgcggtctgtgcggcaactacaatggcaatcagggagatgactttttgaccccgtcgggactggccgaaccacgcgttgaggattttggaaatgcgtggaagctgcacggggactgtcaggatctgcagaagcagcactctgacccatgcgctctaaacccacgcatgactcggttcagcgaggaagcctgcgccgtgctcaccagtcctacgtttgaggcctgccatagggcggtgtcccccctgccttacctcagaaattgccggtatgatgtttgttcgtgcagtgatggtcgagagtgtctttgcggcgctttggcttcgtatgcggcggcatgtgcaggccgcggcgtgcgggtggcatggcgtgaaccgggacgctgcgaattgaattgtcccaaaggccaggtatacctgcagtgcggcactccgtgcaacctgacctgccggtccctgagttacccagatgaggagtgcaatgaggcgtgcttggaggggtgcttctgcccaccgggtctctacatggacgagcgaggcgattgcgtacctaaggcacagtgcccatgctactacgatggagaaatctttcagcccgaggacatcttctccgaccatcatactatgtgctactgcgaagacggcttcatgcactgcactatgtccggcgtgcctggctccctgctgccagatgcggtgctgagctctccgctgtctcaccggagtaaacgatctctgagctgccgccccccgatggtgaagctagtttgccctgccgataatcttcgtgccgagggattagagtgcacgaaaacgtgtcagaactacgatctggagtgcatgtcaatgggttgcgtgtcgggatgcttgtgtccacctggaatggtgcgacacgagaatcggtgtgtcgcgctggagcgatgcccctgtttccaccagggtaaggagtacgcacccggcgaaacagtcaagatcggctgcaatacctgtgtttgccaggatcgcaagtggaattgcaccgatcacgtgtgtgatgctacctgctccactatcggcatggcacattaccttacgtttgatggcctaaagtatctgtttcccggagagtgtcagtacgtgttggtgcaggattactgcggcagtaacccgggcacgttccgtattctggttggcaacaagggctgctcccacccgagcgtgaagtgcaagaaacgtgtcacaattttggtcgagggtggcgaaatcgaattattcgatggtgaggtgaacgttaagcgtccgatgaaggatgagacgcactttgaagtggtcgagagtggccgttacatcatactattactcggtaaggctctgagtgtggtgtgggaccgacacctgtcaatcagcgtagtattgaaacagacctaccaggaaaaagtgtgcggtttgtgtggaaacttcgacggcatccagaataacgatctgaccagtagcaacttgcaggttgaggaggatccagtagattttggcaacagctggaaagtaagttcacagtgtgccgacacacgcaaggttccccttgactcgtccccggccacgtgccacaacaatatcatgaagcagaccatggtcgatagttcctgccgaattttgacgtccgacgtattccaggactgcaataagctcgtagatccagaaccatacctggatgtatgtatctatgatacgtgtagctgcgagagcattggagattgcgcctgcttttgcgacacgatcgcagcctacgcacatgtgtgcgcgcagcatgggaaggtcgtgacctggaggacggccacgctatgccctcaatcctgcgaggaacgtaaccttcgagagaatgggtacgagtgcgaatggcgctataattcctgcgctccggcctgccaggttacctgccaacacccagaacccctggcatgccccgtacaatgcgtagaaggctgccatgcccactgcccgccgggaaagatactagatgagttgttgcagacgtgcgtggatccggaggactgtccggtctgtgaggtggctggccggcgtttcgcctccggcaaaaaggtaaccctgaatccgtcggatccagaacattgccagatatgccactgcgacgtcgtgaacctcacatgtgaggcctgccaggagcctggcggcctcgttgtgccaccaacagacgccccggtatcgccgaccactctgtacgtcgaggacatctccgagccgccgttgcacgacttctactgttcaaggttgctggacttggttttcctactcgatggtagctccagactgagtgaggccgaatttgaggtgctgaaggcttttgtcgtggacatgatggaacggctacgcatctcccaaaagtgggtacgggtggccgtcgttgagtaccacgatggttcccatgcgtacatcggactcaaggaccgcaaacgaccaagtgagttgcgccgtatcgcctcgcaggtgaaatacgccggcagccaggttgcttccacgagcgaggtgttgaagtataccctatttcaaatattctccaaaatcgatcgtccggaagcttcgcgcatcacgttgctcttgatggccagccaggagccacaacgaatgtcccgtaatttcgtccgctacgtccagggcctgaagaagaaaaaggtcatcgtaatacccgtcggaattggtccacacgccaatcttaagcagattcgactaatcgagaagcaggcaccggagaataaggccttcgtcctgtcatccgtagacgagctcgagcagcaaagggacgagatcgtgagctacctgtgcgatctcgcgcccgaagcgcccccaccgacgctgccgcccgatatggcacaagtgacggtggggcccggcctccttggtgtttccacgctaggcccgaaacgtaattccatggttttggacgttgctttcgtactggagggctctgacaagatcggagaggctgacttcaatcgcagcaaggaattcatggaggaggtcattcagaggatggacgtgggccaggactctatccacgtaacagtgctccaatactcctacatggtcactgtggaatatcccttcagcgaagcgcagagtaagggtgatatattacagcgcgttagggaaatccgctatcaaggaggaaatcgcactaacacaggtcttgccctccgatatctatcagatcactcttttctggtgagccaaggcgatagggaacaggccccaaatctagtgtacatggtcactggcaatccggcctccgacgaaatcaagcgcctcccaggagatatacaggtggtgccgatcggtgtaggtcctaacgcgaacgtccaggagctggagcgaattggatggcccaatgcacccatcctgattcaggacttcgagacactgccacgggaagcaccagatctggtgttacaaaggtgctgtagtggcgaaggactccagatcccgacgctgtccccggccccggattgctcacagccgctggatgtgattcttctcctggacggcagttcaagcttccctgcttcgtattttgacgagatgaaatcgtttgccaaggccttcatttcaaaggccaacataggccccagactgacccaagtttcggtactccagtacggtagcataaccaccattgatgttccgtggaatgtggtgcccgagaaggcccacctcctatcattggtcgacgtgatgcaacgcgaaggcggtccgtcacagatcggcgatgcgctcggttttgcggtgcgctacctgacttccgaaatgcacggcgcgcgtccaggagcgtccaaagcagtggttatcttggtcaccgatgtttcggtggactcggttgatgctgcggctgatgcagcacggtcgaacagagttactgtcttcccgatcggcattggcgaccggtacgatgccgcgcagctacgcatccttgccggacccgccggtgattcgaatgtggtcaagctccagcgcatcgaggatctccccaccatggtgactctgggtaattcattccttcataagctctgctccggattcgttagaatatgcatggatgaagatggcaatgaaaagcgaccaggcgatgtctggaccttaccggatcagtgtcataccgtgacctgtcaaccagacggtcaaacgttgctgaagagtcacagggtcaattgcgataggggccttcgtccctcatgcccgaactctcaaagtcctgtgaaggtcgaggagacttgcggttgccgttggacgtgcccctgcgtctgcacgggctccagcacgcgccacattgtcaccttcgatggtcagaactttaaattgacaggatcgtgctcctacgtactctttcagaacaaggaacaagatctggaggtcattttgcataatggagcgtgttctcccggcgcccgccagggatgtatgaagagtattgaggtcaagcactcggctctcagtgtggagctgcacagcgacatggaggttaccgttaatggccgtctggtgtccgtgccatacgtaggcggaaacatggaagttaatgtatatggcgccatcatgcatgaggtgcgcttcaaccatctgggccacatcttcactttcaccccacagaataatgagttccagctacagctgtccccgaaaaccttcgcctctaagacctacggcctctgcggcatatgcgacgagaatggtgccaatgattttatgcttcgtgacggaacagtgacaacggattggaagacgctggtccaggagtggacggtgcagaggcccggccagacttgccagcccatattggaggaacagtgcttggtcccggactcgtcgcattgtcaggtgctgctactgccactgttcgccgagtgtcacaaggtgctggccccagccacgttttacgcaatttgccaacaagacagctgtcaccaggaacaggtgtgcgaggttatagcctcctacgctcatttgtgtcgtaccaatggtgtctgcgttgattggcgaacaccggatttctgcgcgatgtcgtgcccgccatcattggtgtataaccattgcgagcatggctgcccacggcattgcgatggcaatgtctcgtcgtgcggcgatcatccgagcgagggttgtttctgcccaccagacaaggtgatgctggagggatcctgtgtcccagaggaggcatgcacacagtgcatcggagaggatggagttcagcatcagtttctggaggcatgggttcccgatcatcagccatgccagatctgcacctgcctgagcgggcggaaagtgaactgtaccacccagccttgccccacggcaaaggctccaacatgcggcctgtgcgaggttgctcgactacgccaaaacgccgatcagtgctgcccagaatatgagtgtgtctgtgaccccgtctcctgcgatctgccgccagtccctcattgcgagcgtggactgcagcccactctgacaaaccctggcgagtgccgccccaatttcacgtgcgcatgtagaaaggaagaatgcaagcgcgtgtcccccccatcctgtccgccacaccgtctcccaacccttcggaaaacgcagtgctgcgatgagtacgagtgcgcctgcaattgcgtgaactcaactgtttcgtgcccgctcggatacctggcctcgacggcaacgaacgattgcggctgtacgactacgacatgtttgcccgataaggtatgcgtgcatcggtccactatttatcccgtgggacaattttgggaggagggatgcgatgtgtgcacctgcacggacatggaggatgctgttatgggcctccgcgtggcgcagtgcagtcagaaaccatgcgaggattcttgccgatcgggctttacctatgtgctgcacgagggcgagtgctgcggacggtgcctgccaagcgcgtgcgaggtcgtgacaggcagcccccgtggtgactcccagagctcgtggaagagcgtcggatctcaatgggcaagcccagagaatccctgcctcatcaacgagtgcgtgcgcgtcaaggaagaagttttcattcagcagagaaatgtgtcctgtcctcagctcgaagttccagtttgcccctctggcttccaactatcctgcaagacaagtgcctgttgcccatcttgcaggtgcgagcgcatggaggcctgcatgttgaacggaacggtgatcggccccggtaagacagtcatgatagatgtttgcaccacgtgccgttgcatggtgcaggtgggcgtaatcagcggtttcaaattggagtgccgtaagaccacgtgcaacccctgcccactgggatacaaggaagaaaacaataccggcgaatgctgcggccgctgcttgccgacggcgtgcaccatccagctccgaggaggtcagattatgacgctgaagagagatgagacactgcaggacggctgcgatacccatttttgtaaggtcaacgaacgcggtgaatatttctgggagaagcgagtgacgggatgtccgccatttgacgagcacaaatgtctggcagaaggaggaaagattatgaagattccggggacctgctgcgacacatgcgaggagcccgagtgcaatgatattaccgcaaggctgcaatatgttaaggtgggaagctgtaaaagcgaggtggaggtcgacatccactactgccagggcaagtgcgcgtccaaggctatgtatagtatcgacatcaacgatgtgcaagaccagtgttcctgctgcagcccgacccgcacggaaccaatgcaggtggccttgcattgcacgaatggcagcgtggtgtatcacgaagtgctgaacgccatggagtgtaagtgctcgccgcgcaaatgctccaag

SEQ ID NO: 21325 - DNA, 8439 bp, synthetic construct
  misc_feature 1..8439: note = source = /note="Description of Artificial Sequence: Synthetic coding sequence"
  source 1..8439: mol_type = other DNA
atgatccctgctcgctttgccggtgtattactggcccttgctttgattctgccaggcactctgtgcgccgagggaacccgcggcagatcctcaaccgcccgctgttctttatttggcagcgattttgtcaatacattcgatggaagcatgtacagctttgctgggtactgttcatatctcctggccgggggttgtcagaagagaagcttcagcatcatcggtgacttccagaatggcaaaagggtaagcctgtccgtgtacctgggcgaattctttgacatccatctcttcgttaatggcactgtcactcagggggaccagagggtgtctatgccatacgcctccaagggactgtacctggagaccgaagcaggctattataaactgtcaggcgaggcctatgggtttgttgccagaattgatggctctggaaactttcaggtgcttttgagcgacagatattttaacaagacttgtggcttatgcggcaacttcaacatatttgccgaagacgattttatgactcaggagggcactctgacatcagacccctacgacttcgccaactcctgggcgctcagttctggcgaacagtggtgtgaaagggcttcaccaccaagcagctcttgtaacataagttccggcgagatgcagaaggggctttgggagcaatgccagttgctcaagtcaacaagcgtgttcgcgcgctgtcacccgctcgtggaccccgaacccttcgtcgctctctgtgagaagacattgtgcgagtgcgcaggtggcctggaatgtgcgtgtccagcactcttagaatatgctcgcacttgtgctcaagaaggcatggtcctttacggctggacagatcacagtgcctgtagccctgtttgtccagcaggaatggaatatcgacagtgtgtcagcccatgtgccaggacctgccagagcctccatatcaacgaaatgtgtcaggagcgttgtgtcgatggttgctcatgcccggagggacagcttctcgacgagggtttgtgtgtcgagagcaccgaatgcccttgtgtgcactctggtaagcggtaccctccggggacttcactgagcagagattgcaatacctgcatctgtcggaactcgcagtggatctgctccaatgaggagtgtcctggcgagtgcctcgtgacaggacagagccactttaaatccttcgataacaggtattttacattctccgggatctgtcaatacctcctcgctcgggactgccaggaccactccttttccatagtcatcgaaaccgtgcagtgtgcggatgacagagacgccgtatgcacacgttcagtgactgtgagactgccgggacttcacaacagccttgttaagctgaagcacggagcgggagtcgctatggacggtcaggatgtgcaactgcctcttctaaaaggggacctcagaatccagcatacagttactgcgtcagtgcgcctgtcctacggagaggacttgcagatggattgggatgggaggggcagacttttggtgaaactctcccctgtctatgcaggcaaaacctgtggactctgcgggaattataatggtaaccagggcgatgactttctaacacctagcggtctggctgaaccccgggttgaagactttgggaatgcctggaaactccacggggactgccaagacttgcagaagcaacactctgatccatgcgccctgaacccgaggatgactaggtttagcgaggaagcttgcgcagtgttaacttcccctacattcgaggcgtgccatcgggctgtgagtcccctgccttacttgcggaattgtcggtacgacgtctgttcatgcagtgacggaagggaatgcctgtgtggtgctttggcatcctatgctgcagcctgtgcgggacgcggcgtccgcgtggcctggagggagccaggaaggtgcgaattgaactgtccaaaggggcaggtgtaccttcaatgtggcactccttgcaacttgacatgtcggagcctgagttatcccgacgaggaatgtaatgaagcatgtcttgaaggctgtttctgtccgcctgggctctatatggatgagcgcggagactgtgtccctaaagcacagtgtccttgttattatgatggtgagatcttccaacctgaagacattttctcggaccaccacaccatgtgttactgtgaggacgggttcatgcattgcaccatgtctggtgttcctggtagtctattgcccgacgccgttctctccagtcccctgtcccaccgctcgaaacggtctttgagctgtcggcctccaatggtgaagctcgtttgtcctgccgataatctccgcgccgagggattagagtgcactaagacctgccagaactatgacctcgaatgtatgtcgatgggatgcgtgagcggatgtctgtgcccacctggcatggtgaggcacgagaatcggtgcgtagcactggaaagatgcccctgttttcaccaagggaaggaatatgcccctggtgaaacagtcaagatcggatgtaatacttgcgtgtgccaggataggaagtggaactgcaccgaccatgtgtgtgatgccacatgttcaacaattggcatggcacactatctcacattcgatgggctgaagtacctttttccaggcgaatgccagtacgtgctggttcaggactattgcgggtccaatccaggcacgtttcggatcctggtgggtaacaaggggtgcagtcatcctagcgtgaaatgtaagaagagagtcacaattcttgtagaaggtggggaaattgagctgtttgatggtgaagtaaatgttaaacgcccaatgaaagacgaaacgcatttcgaggttgtggagagcgggcgctatatcatcctgctgctgggcaaggcgctttcagttgtctgggatcgacatctgtctatctctgtcgtgctgaagcagacctaccaagagaaggtgtgcggtctttgtgggaactttgacgggatacagaacaatgacttgacgtcatccaatctgcaggtcgaggaagatccggtggatttcggcaactcctggaaagtatcttcccagtgtgctgacacccggaaagtacccctcgacagttcacctgccacatgtcacaataatattatgaagcaaaccatggtggattcttcgtgccgaatccttacatccgatgtcttccaggattgtaataagctcgttgatcccgaaccttacttggatgtctgtatatatgacacctgttcgtgcgagtctattggcgactgcgcgtgtttttgtgataccattgctgcctacgcccacgtctgcgcccagcacggcaaggtggtgacatggcgtacggccacactttgcccgcagtcttgtgaggaaagaaacttaagggagaacggatacgagtgtgagtggcggtacaattcttgtgcaccagcttgccaggtgacatgccagcatccagaaccactggcatgccctgtacagtgcgtcgaagggtgccacgcgcattgccccccaggtaagattttggatgagcttcttcaaacatgtgtggaccccgaagactgccctgtctgcgaagttgctggccggcggtttgcaagcggcaagaaagtgactctgaatcctagtgatcctgaacattgtcaaatctgccactgcgacgtggtgaacctgacctgcgaggcttgccaggaaccgggaggactggtggtgccgcccacagatgcaccggtgtccccaaccacgctctacgttgaagatatatccgagccacccctacatgatttctactgctctagactgctggatctggtattcttgttggatggttcctctcggctctccgaagcagagttcgaggtcctgaaggcctttgtcgtggacatgatggagaggctgaggatctctcagaagtgggtccgggtcgctgtggtagaataccatgacggaagccatgcatacatagggcttaaggataggaaaaggccctctgagcttcgaagaatcgccagccaggtaaagtacgcaggttcgcaggtcgcttctaccagcgaggttctcaagtataccctgttccagattttctcaaagatcgacaggcccgaagcaagccgaattactctgctacttatggcttcccaagagcctcagagaatgagcagaaattttgtccgttatgttcaggggctgaaaaagaaaaaagtgattgtcataccagttgggatcggcccccacgctaacctcaaacaaattagactcatcgaaaagcaggcccctgagaataaagcgttcgttctgtcctcagtggacgagttggaacagcagagggacgagattgtctcctacctatgcgatctggcgcccgaagctccaccgcctactctgccacctgacatggcccaagtgactgtgggtccaggacttttgggggttagtacactcggcccaaagcgtaacagcatggtgctggacgtggcgttcgtacttgaggggagtgataagatcggagaggccgattttaatcgaagcaaagaatttatggaggaggtcatccaacgcatggacgtggggcaggatagcatccatgtaactgtcctgcagtattcatatatggtgaccgtggagtaccccttttcggaggcccaaagtaaaggtgatatactgcagcgcgtacgggagattcgctaccagggaggaaaccgaactaatactggtctggcgctgaggtatctttccgaccactcctttctggtgagccaaggcgatcgtgagcaggcccccaatcttgtttatatggttactggcaacccagccagtgacgaaattaagaggctgccgggggacatccaggtagttccgattggcgtaggccctaatgctaatgtgcaagagctagagaggattggatggcccaatgccccgatcctcatccaggattttgagacgcttccaagggaggcccctgacctggtcctacagcgctgttgctccggggagggattgcagattcctacactgtcccccgcccctgactgtagccagccacttgatgtcatcctgctgttagacgggtccagcagttttcccgctagttatttcgatgaaatgaagagttttgcgaaagcctttatttccaaagcaaacatcggcccacggctgacgcaggttagcgtgctgcagtacggctccattacaaccatcgatgtgccatggaatgttgtgcccgagaaggcacacctgttgagtctcgttgacgtcatgcagagagaaggcgggccttcacaaataggggatgctctcggtttcgccgtgcgctatctgacatccgaaatgcacggggccaggccaggcgcttcaaaggctgtcgtgatcttggtgacagatgtgtccgtggattctgttgacgccgcagcagatgcagctcgcagcaatcgtgttacagttttcccaattgggattggcgacagatacgatgccgcccagttgcgcatacttgccggtccagcaggcgattccaatgtcgtgaagttgcagcgcattgaagaccttccaactatggtcaccctgggaaacagtttcctgcataaactgtgctcaggattcgtccgcatctgtatggacgaagacggcaacgagaaaagacccggcgatgtatggaccctgcctgaccaatgccacaccgtgacgtgtcaacctgacggacagacactgctgaagtctcaccgggtaaactgcgaccgcgggctgcggccgtcttgcccgaattcacagtctcctgtgaaggtagaagaaacgtgcggatgtagatggacgtgcccctgtgtatgcactggctcctctacacggcacattgtgaccttcgatggccagaacttcaaattgaccggctcttgctcctatgtcctttttcagaacaaggaacaggatctggaagttatcctgcataacggggcatgttctccaggggcccgccaaggttgcatgaaatcaatcgaggtgaaacatagcgctctctctgtggagctgcactcagacatggaagtgacagtaaacggtcggcttgtcagtgtgccgtacgtgggcggcaatatggaagtgaatgtatacggcgccataatgcatgaggtccggttcaatcatcttggtcacattttcaccttcaccccacagaataacgaattccagctccaacttagtcctaagacgtttgcgtccaaaacctatgggctctgcgggatctgcgatgagaatggagctaatgacttcatgcttcgagatggcaccgtgaccacggattggaaaacccttgtacaggagtggacggtgcagagacccgggcagacttgtcaaccgattttggaagagcaatgtctggtgccagattcctctcactgtcaggttctcctgctgcctctattcgccgagtgccataaggttctcgctcctgccacattctatgcaatatgtcaacaagactcctgccaccaggaacaggtgtgcgaggtaatagcctcgtatgcccacctatgtagaacaaacggagtctgcgttgattggcgaacaccggatttctgtgctatgagctgcccacccagtcttgtctataaccattgtgagcacgggtgccctagacattgcgatggtaacgtgagttcctgtggggatcaccccagcgaaggctgcttttgtccacctgacaaagttatgctcgaaggctcctgcgttccagaagaggcttgcacccagtgtatcggtgaggacggcgtccaacatcagttcctagaggcctgggtccccgatcaccaaccgtgtcagatttgcacttgcctttctggccgtaaagtgaactgtaccacacaaccatgtccgactgctaaggcgcctacctgtggtttgtgcgaggtggcacgcctgcgccaaaacgctgaccagtgctgccctgagtatgagtgtgtctgcgatcccgtcagttgcgacttgccccccgtgccccattgcgaacgcgggctgcaacctaccctcacgaaccccggtgaatgtaggcctaactttacttgtgcatgtcggaaggaagagtgcaagagggtctcccccccctcttgccccccacaccgactccccactctgcggaaaactcagtgttgtgacgagtacgaatgcgcatgtaattgcgtgaattctaccgtttcctgtccactcggatatctggcatctaccgctactaatgattgcggctgcaccaccaccacctgtttgccggataaagtgtgtgtgcaccggtcaacgatttaccccgttggacagttctgggaagaaggatgcgacgtttgcacctgtacggatatggaggatgctgttatgggcttgcgcgtcgctcaatgctcccaaaagccctgtgaagatagctgccgaagcgggttcacttacgtgttgcacgagggcgaatgttgtggccgctgcctaccttcagcctgtgaagtggtaacaggctccccgcggggggatagccagtcgtcttggaagagcgtgggaagccagtgggcttctccagaaaacccatgcttgattaacgaatgtgtgcgagtgaaggaagaagtgtttatccagcagcgcaacgtgagctgtccccagctagaggtccctgtctgtccctcgggctttcagcttagctgcaaaactagcgcctgttgcccgtcctgtcgatgcgagcgaatggaggcttgcatgttgaacggaactgtgattggtccaggcaagacagttatgatcgatgtttgtaccacgtgcagatgtatggtgcaggttggcgtaatttcaggtttcaagctggagtgtcgtaaaactacatgcaatccatgcccgttaggatacaaagaggagaataacaccggcgagtgctgcggaagatgtctccccacggcatgtaccattcagctgcgcggcggtcagatcatgacgctgaaaagagatgaaacgctccaggacggatgcgacacacacttctgcaaggttaacgaaagaggggagtatttttgggaaaagcgcgtgaccggctgccctccctttgatgagcataagtgtctagcagagggcggaaagattatgaagattccaggcacatgttgcgatacttgtgaggaaccagagtgcaacgacatcaccgcgcggctgcagtatgtgaaggtcgggtcctgcaagtcagaagtcgaggtggacatccattattgccaagggaagtgtgcttcaaaagccatgtacagcattgacattaatgatgtacaagaccaatgctcttgttgctcaccaaccagaactgagccaatgcaagtggccctccactgcacaaacggcagtgtggtctatcatgaggtgctcaacgccatggagtgcaaatgcagcccccgcaaatgcagtaaa

SEQ ID NO: 21326 - DNA, 8439 bp, synthetic construct
  misc_feature 1..8439: note = source = /note="Description of Artificial Sequence: Synthetic coding sequence"
  source 1..8439: mol_type = other DNA
atgattccggctcggttcgccggagtgctcctggccctggctctgatcctgcctggcactctctgcgctgaaggaacccgcgggagaagctctaccgccaggtgctcactgttcggctccgattttgtgaacacgttcgacgggtctatgtattcattcgctggctactgcagctacctcctggccgggggatgtcagaagcgcagcttttccatcattggtgactttcagaatggaaagcgagtgtccctgagcgtctacctgggtgaattcttcgacattcacctgttcgtcaacggaacggtcacccagggcgaccagcgcgtgtcgatgccatacgccagcaaaggcctgtacctggaaaccgaggcgggctactacaaactgagcggcgaggcctacggattcgtcgccagaatcgatggatcggggaacttccaggtcttgctctcggatagatacttcaacaagacctgcggtctgtgcggcaactttaacatcttcgcggaggacgatttcatgactcaggaaggaactttgacctccgatccgtacgattttgcaaattcgtgggcactgtcaagcggagagcagtggtgcgaacgggcttccccaccgtcgtcaagctgtaacatcagctccggagagatgcagaagggactgtgggaacagtgtcagctgctcaagtccacctcggtctttgcccggtgccacccgctggtcgatcctgaaccgttcgtggcgctgtgcgaaaagaccctctgcgaatgcgcgggaggcctggagtgtgcgtgcccggccctcctggagtacgccagaacttgtgcgcaggaaggaatggtgctgtacggttggactgaccattcagcgtgctcgccggtgtgcccggccggaatggagtaccggcaatgcgtgagcccgtgcgcccgcacttgccagtcacttcatatcaatgagatgtgtcaagaacgctgcgtggacggttgctcgtgcccggaaggccagctgctcgatgagggcctgtgcgtggaatcaactgaatgtccgtgtgtgcactccgggaaacgatacccgccggggacgtccctgagccgggactgtaatacctgcatctgccggaacagccagtggatttgctcaaacgaggaatgtccgggggaatgcctggtgaccggacagtctcactttaagagctttgataacagatacttcacctttagcggaatctgccagtacctcctggcgcgggattgccaggaccacagcttcagcatcgttatcgagactgtgcagtgcgccgacgacagagatgcggtgtgcaccagaagcgtcactgtccggctgccgggactgcataactctctcgtgaagctgaaacatggagctggcgtggcaatggacggacaggatgtgcagttgccgctgctgaagggggacctcagaatccagcataccgtgaccgcttccgtgcgcctctcctacggagaggacctgcaaatggactgggacgggcgcggccggctgctggtgaaactctcgccggtctacgcaggaaagacctgtggactgtgcggaaactacaacggaaaccagggagacgactttctgactcctagcggactggctgagccaagagtggaggactttggaaacgcctggaagctccacggagattgccaggatctgcaaaagcagcactcggacccatgcgctctcaatccacgcatgactaggttctccgaagaggcttgtgcagtcttgacctcccctacctttgaggcctgccaccgcgctgtgtcgccgttgccgtacctcagaaattgccggtacgacgtctgttcctgctccgatggacgggaatgcttgtgcggagcactcgctagctacgcggccgcatgcgccgggagaggagtgcgtgttgcctggcgggaaccgggaagatgcgaactgaactgtcccaagggccaagtgtacctgcagtgcggcaccccgtgtaatctcacttgtagaagcctgagctacccagatgaagaatgcaacgaggcctgccttgaaggctgcttctgtccgcctggattgtacatggatgagaggggagactgtgttccgaaggcgcagtgcccttgctactacgatggagagatcttccagcctgaggacatcttttccgaccatcacaccatgtgctactgtgaggacggattcatgcattgcactatgtccggagtgcctggatcactgctgccggacgcggtcctgagctcgccactgtcccacagatcgaagaggtccctctcctgccggccgccaatggtcaagctggtgtgccccgccgacaatttgagagccgagggactggagtgcacgaaaacgtgccagaactacgacctggagtgcatgtctatgggttgcgtgagcggttgtttgtgcccgcctgggatggtgcgccacgagaaccggtgcgtcgctctggaaaggtgcccgtgtttccatcagggcaaagaatacgcgcctggtgagactgtaaagataggatgcaacacctgcgtgtgtcaggaccggaaatggaattgcactgatcacgtgtgtgacgccacttgttcgactatcggcatggcccactatctgacctttgacggactcaaatatctgtttccgggggagtgtcaatatgtgctggtgcaggattactgcggatcgaaccctggaacgttccgcatccttgtgggaaacaagggatgttcgcatccaagcgtcaaatgcaaaaagagagtcactatcctcgtggagggcggggaaatcgaactgttcgacggagaggtcaatgtgaagcggccaatgaaggatgaaactcattttgaggtggtggaaagtggacgatacattatcttgctcctcggtaaggcactgtctgtggtgtgggaccgccacctgtctatctcggtggtgctgaagcaaacctaccaggaaaaggtgtgtggcctttgcgggaactttgacggaatccaaaacaacgacctcactagctccaacctgcaggtggaagaagatccagtggattttggaaacagctggaaggtgtcatcacagtgcgctgatacccggaaggtgccgctcgactcatcaccggccacttgccacaataacattatgaagcagaccatggtcgactcgtcatgcaggatcctgacttcggacgtgtttcaggattgcaataagctggtggatccggaaccgtatttggacgtgtgtatctatgacacctgctcttgtgagtccattggggactgtgcatgcttctgcgacactatcgcggcgtacgcacatgtgtgcgcacagcacgggaaggtggtaacctggcggactgctaccctgtgccctcagagctgcgaggaaagaaacctccgggaaaacgggtacgagtgcgagtggcgctacaatagctgcgccccggcgtgccaggtcacctgccagcacccagagccgttggcgtgtccagtgcaatgcgttgaggggtgccatgcgcattgccccccaggaaagatcctggacgaactgcttcagacttgcgtcgatccagaggactgcccagtgtgtgaggtggccggccgtaggttcgcctccggtaaaaaggtaactctcaacccctcggaccctgaacactgccagatttgccactgtgacgtcgtgaacttgacctgtgaagcatgtcaagagccggggggcctggtggttccgccaactgatgcccctgtgtcgcccactactctctacgtcgaagatatcagcgaacctccgttgcacgacttttactgctcgagactccttgacttggtgtttctcctggatgggtcgtcgcggctgagcgaagctgaattcgaggtgctcaaggcatttgtggttgacatgatggaaagactgcggattagccaaaagtgggtgcgggtggctgtggtcgaataccacgacggatcgcacgcctacatcggcctgaaagatcggaagcgtcctagcgagctcagacgcatcgccagccaggtgaaatacgctggatcccaggtcgccagcacttccgaggtcctcaaatacaccctcttccagatcttttcaaaaatcgatcgcccagaggcatcgcggattaccctgctgctgatggcgtcccaggagccacaaagaatgtcgcggaacttcgtccgctacgtgcaggggcttaagaaaaagaaggtgatcgtgattcccgtgggaatcggccctcatgccaatctgaagcaaattaggctcatcgaaaaacaggcgcctgaaaacaaggctttcgtgctgtcatcggtggatgagctggagcagcagcgcgatgaaatcgtgagctacctttgtgacctggccccggaagcgccgccgcctactctgccgccagatatggcgcaggtgaccgtgggtcccggtttgctgggcgtgagcaccctgggaccgaagcggaacagcatggtgctggatgtggcgttcgtgttggaaggctcggataagatcggcgaagctgacttcaatcggtccaaggagttcatggaggaagtgatccaacgcatggatgtcggacaagactccatccacgtgactgtgctccagtacagctacatggttactgtggagtacccatttagcgaggcccaatctaagggtgatatcctccagcgcgtcagagaaatccggtaccagggagggaatagaactaatactggactggcgctccggtacctgtcagatcactcgttcttggtatcccaaggcgaccgcgaacaagcccctaaccttgtctacatggtgaccggaaatccagcgtccgacgagatcaagcgccttccaggagacatccaggtcgtcccgatcggggtcggaccaaacgctaacgtccaagagctggaacggatcggatggccaaatgccccaatcctcatccaggatttcgagactctgccgcgggaagcaccggatctcgtgcttcagcggtgttgctcaggggagggcctgcagatccccactctctctccggcgcccgattgctcccagccactggatgtgatcctcctgctggacggatcctcatcgttcccggccagctattttgacgagatgaaatccttcgcgaaagcatttatcagcaaggcgaacatcggacctagactcactcaagtgtccgtgctgcaatacggctcaattactactatcgacgtgccatggaacgtggtcccggagaaagcgcatttgctcagccttgtggatgtcatgcaacgcgagggtgggccttcgcaaattggagatgccctcggattcgccgtgcggtaccttacgtcggagatgcacggggcaaggcccggagcatccaaggcagtggtcatcctggtgacggacgtgtcagtggattcggtggatgccgcagcggacgcagctcgctcgaatagggtgacggtgttcccaatcggaatcggggatagatacgatgcggcacagctccgcattctcgctggcccagccggggactctaacgtggtgaagctgcagcggatcgaggacctgccgactatggtgaccctgggtaactcctttctgcataagctctgttccggcttcgtgcggatctgtatggacgaggatgggaacgagaagcgacccggcgatgtttggaccctgccggatcagtgccatacggtgacctgccagccggacggacagactctgctcaagtcgcatagagtgaactgcgatcgcgggcttagacctagctgtccgaacagccagtcgccagtgaaggtcgaagaaacctgtggatgccgatggacctgcccttgcgtgtgcactggaagctctactcgccacattgtcactttcgatggtcaaaactttaaactgaccggaagctgttcctacgtgcttttccagaacaaggagcaggatctggaagtgatcctgcacaacggggcctgcagcccgggagcccgtcagggatgcatgaagtccatcgaagtgaagcattccgccctttcagtcgaactgcactcggatatggaggtgaccgtcaacggaaggctcgtgagcgtgccctacgtcggaggaaacatggaagtgaacgtgtacggcgctatcatgcatgaagtgcggttcaaccatctggggcacatattcaccttcactccccagaacaacgaattccaactgcaactgtcgccgaaaaccttcgcttccaaaacttatggactttgcgggatctgcgacgagaatggagcgaacgatttcatgctgcgcgacggtactgtcaccactgattggaaaacgcttgtgcaagaatggaccgtccagcgcccgggccagacctgtcagcctatcctcgaagaacagtgcctcgtaccggactcgtcccactgccaggtgctgctccttccgctgttcgccgagtgccacaaggtcctggcgcccgccactttctacgccatttgccaacaggactcctgtcaccaggaacaagtttgtgaggtcatcgcatcgtatgctcacctgtgcagaactaacggtgtctgcgtcgactggcggactcccgatttttgcgccatgagctgccccccgagccttgtgtacaaccattgtgaacacggttgccctcgccactgcgacggaaacgtgtcgtcgtgcggggatcacccgtcggaaggatgcttctgcccccctgataaggtcatgctggaggggtcctgcgtgccggaagaggcgtgcactcagtgtatcggtgaagatggagtgcagcaccagttcctggaagcatgggtcccagaccatcaaccgtgccagatctgcacctgcctgtcgggccgcaaggtcaactgcaccactcaaccatgccccaccgccaaggccccaacctgcggtttgtgcgaagtggcccggttgaggcagaacgccgaccaatgctgcccagagtatgaatgcgtgtgcgacccagtctcatgcgacttgccaccggttccgcactgtgagcgggggttgcaaccaaccttgactaacccgggtgaatgccggccgaacttcacctgtgcgtgccgcaaggaggaatgcaagcgggttagcccaccgtcgtgccctccacatagattgccaacccttcgcaagacccaatgctgtgatgaatacgagtgtgcttgcaactgcgtgaactccactgtgagctgccctctgggttacctggcctcgactgcgactaatgactgcggatgcaccaccaccacttgtttgcctgacaaagtctgcgtgcaccgctcgactatctacccggtggggcaattctgggaagaaggttgcgatgtctgcacttgcactgacatggaagatgctgtgatgggcctgcgcgtggcccagtgcagccagaagccctgcgaagattcctgtagatccggattcacctacgtgctgcacgagggtgaatgctgcggacggtgcttgccttctgcatgcgaagtggtcactggctcgcctcgcggagattcacagtcatcctggaagtcggtcggatcacaatgggcatcccctgaaaacccatgcctcatcaatgaatgcgtgcgggtgaaggaagaagtgttcatccaacagcgcaacgtgtcatgcccgcaacttgaagtgccggtgtgtccttcgggattccaactgtcctgtaagacttccgcgtgttgtccgtcgtgccggtgcgagcgcatggaggcctgcatgctgaatggaaccgtcattggacccggcaaaaccgtgatgatcgatgtgtgcaccacctgccggtgcatggtgcaagtgggagtgattagcggattcaaactcgaatgtaggaaaacgacttgcaatccttgccccctcggatacaaggaggaaaacaacacgggagaatgctgcgggaggtgcctccctacggcctgtaccatccagttgcggggaggacaaatcatgacgctgaagcgcgacgaaaccctgcaagatggctgcgacactcacttttgcaaagtgaacgaacggggcgagtacttctgggagaaacgcgtgaccggttgcccaccgttcgacgaacataagtgtctggcagaaggcgggaagatcatgaagatccccgggacgtgctgcgacacctgtgaggagccggaatgtaacgatattactgcccgcctgcaatacgtcaaggtgggatcgtgcaagtccgaagtggaggtggacatccactactgccaaggaaagtgcgcctccaaagcaatgtactcgatcgacatcaatgacgtgcaggaccagtgctcgtgctgttctccgacccgcactgaaccgatgcaggtcgcgcttcattgcaccaacggaagcgtggtgtaccatgaggtgctgaacgcaatggaatgcaaatgttcaccgcgcaagtgctcgaag

SEQ ID NO: 21327 - DNA, 8439 bp, synthetic construct
  misc_feature 1..8439: note = source = /note="Description of Artificial Sequence: Synthetic coding sequence"
  source 1..8439: mol_type = other DNA
atgattcctgctcgatttgcaggtgttttattagcacttgcattaattttaccaggaactttgtgtgcagaaggtacaagaggaagatcttctactgctagatgtagtttattcggttctgatttcgtaaacacatttgatggatctatgtattcatttgctggttattgctcttatcttttagctggaggttgtcaaaaaagatcattttcaattattggagattttcaaaatggaaaaagagtaagtctatctgtttatcttggagaattttttgacatacatctttttgttaacgggactgtcacacagggagatcaaagagtgtcaatgccatatgcatcaaagggactttatttggagactgaagcaggatattataaattaagtggagaagcatatggatttgttgctagaattgatggaagtggaaatttccaagttttactaagtgatagatattttaataaaacatgtggactttgtggaaattttaatatatttgccgaagatgactttatgacacaagaaggaactcttactagtgatccttatgactttgcaaatagttgggcccttagtagtggagaacaatggtgtgaaagagcttcaccaccaagttcttcatgtaatatttcatctggagaaatgcaaaaaggattgtgggaacaatgtcaattattaaaaagtacatcagtttttgcaagatgtcatccacttgttgatcctgaaccatttgttgcattatgtgaaaagacattatgtgaatgtgctggtggtttagaatgtgcatgtcctgctttattagaatatgcaagaacatgtgcacaagaagggatggtcctttatggatggacagatcattcagcttgttctccagtttgtccagctgggatggaatatagacaatgtgtttcaccatgtgcaagaacatgtcaatcattacacataaatgaaatgtgtcaagaaagatgtgttgatggatgttcttgtcctgaaggacaacttcttgatgaaggtttatgtgtggaatctacagaatgtccttgtgttcattcaggaaaaaggtatccaccaggaacttcattaagtcgtgattgtaatacatgtatatgtagaaattctcaatggatttgttctaatgaagaatgtccaggagaatgtcttgttactggacaatcacattttaaaagttttgacaatagatattttacattctcaggtatttgtcaatacttacttgctagagattgtcaagatcattctttctctattgtaatagaaactgttcaatgtgcagacgatagagacgcagtttgtactagatcagtcactgttaggttaccaggattacataattctttagttaaattgaaacatggtgcaggagttgctatggatggacaagatgttcaacttccacttcttaaaggtgatcttagaattcaacatacagttactgcttcagttcgactaagttatggagaagatttacaaatggattgggatggaagaggtagattactagttaaattatcgccagtatatgctggaaaaacatgtggactttgtggaaattataatggaaatcaaggagatgattttttaactccatcaggtcttgctgaaccaagagttgaagattttggtaatgcatggaaattacatggggattgtcaagatcttcaaaaacaacattcagatccatgcgcattaaatccaaggatgacaagatttagtgaagaagcatgtgcagtattaacatccccaacatttgaagcatgtcatagggcagtttcaccattaccttatttaagaaactgtagatatgatgtatgttcctgtagtgacggaagagaatgtttatgtggagcattagcttcatatgcagcagcatgtgcaggaagaggagttagagttgcttggagagaaccaggaagatgtgaacttaattgtccaaaaggacaagtttatcttcaatgtggaactccttgtaatttaacatgtagaagtttatcttatcctgatgaagaatgtaatgaagcttgtcttgaaggatgtttttgtccaccaggtttatatatggacgagagaggagattgtgttccaaaggctcaatgtccttgttattatgatggagaaatttttcaacctgaagatatttttagtgatcatcacactatgtgctattgtgaagatggattcatgcattgtactatgtccggagtaccaggatcattattaccagatgcagtacttagttcaccactttcacacagatctaaaaggtcattatcgtgtagacctccaatggttaaattagtatgtcctgcagataatttaagagctgaagggttggaatgcacaaaaacatgtcaaaattatgatttagagtgtatgtctatgggttgtgtttctggttgtttatgcccacctggtatggttagacatgagaatagatgtgtggctttagaaagatgtccatgttttcatcaaggaaaggaatatgcaccaggagaaactgttaaaataggatgtaatacttgtgtttgtcaagatagaaaatggaattgtacagatcatgtttgtgacgcaacttgtagtactatcggaatggctcattatttaacatttgatggtttaaaatatctttttccaggtgaatgtcaatatgtgttagttcaagattactgtggatcaaatcctggaacttttagaatacttgtcggaaataaaggatgttcacatcctagtgtaaaatgtaaaaaaagagtaacgattcttgttgaaggaggtgaaatcgaactttttgatggtgaagttaatgttaaaagaccaatgaaagatgaaacacattttgaagttgttgagtcaggtagatatattattcttttgttaggaaaagcacttagtgttgtatgggatagacatctttcaatatcagtagtattaaaacaaacatatcaggaaaaggtttgtggattatgtggaaattttgatggaattcaaaataatgatttaacttcatcaaatttgcaagtcgaagaagatccagttgattttggtaattcatggaaagtttcttctcaatgtgctgatactcgaaaagtgccattagatagttctcctgctacatgtcataataatataatgaaacaaactatggttgactctagttgtagaattttaacttctgacgtttttcaagattgtaataaacttgttgatcctgaaccatatctagatgtttgtatttatgacacatgttcatgtgaaagtattggtgattgcgcttgtttttgtgatactattgcagcatatgctcacgtttgtgcacaacatggaaaagttgtaacatggagaacagctactctttgtccacaaagttgtgaagaaagaaatttaagagaaaatgggtatgaatgtgaatggagatataattcttgtgctcctgcttgtcaagttacttgtcaacaccctgaacctttagcatgtccagttcaatgtgtagaaggatgtcatgcacattgcccaccaggtaaaattcttgatgaattattacaaacttgtgttgatccagaagattgtcctgtttgtgaagttgctggaagaagattcgcaagtggtaaaaaggttactttaaatccatcagatccagagcattgtcaaatttgtcattgtgatgtagtaaatcttacatgtgaagcatgtcaagaacctggaggattagttgttccaccaacagatgctccagttagtccaacaacactttatgttgaagatatttcagaaccaccactacatgatttttattgctcaagacttttagatcttgtatttttattggatggttcaagtagattgtcagaagcagaatttgaagttttaaaagcatttgtagtagacatgatggagcgattaagaattagtcaaaaatgggttagagtagcagtggttgaatatcatgatggttcacatgcatatataggattgaaagatcgaaagcgtccatctgaattaagaagaattgcttctcaagttaaatacgctggatcacaagtggcttctacatctgaagttttgaaatatacactttttcaaattttttctaaaatcgatagaccagaagcaagtagaattactttattacttatggctagtcaagaaccacaaagaatgtcacgtaattttgttagatatgtccaaggattaaaaaaaaaaaaagttattgtaatcccagttggtattggaccacatgctaacttaaaacaaattagacttattgaaaaacaagctccagaaaataaagctttcgttttaagttctgttgatgaacttgagcaacaaagagatgaaattgtatcatacctttgtgatttagcaccagaggcacctccaccaacacttccaccagatatggctcaagttactgttggtccaggattattaggagttagtacgttaggacctaaaagaaattctatggtattagatgtagcatttgttcttgaaggatctgataaaatcggtgaagctgactttaatagaagtaaggaatttatggaagaggttattcaaagaatggatgtaggtcaagattcaattcatgtcactgttttacaatattcatatatggtaacagttgagtaccctttttcagaagctcaatctaagggagatattttacaaagagttagagaaattagatatcaaggaggaaatcgaacaaatacaggattagcattaagatatttatctgatcactcatttcttgtttcacaaggggaccgtgaacaagctccaaatttggtttatatggtaactggtaatccagctagtgatgaaattaagcgtttaccaggagacattcaagtagttccaattggagttggaccaaatgcaaacgttcaagaattagaaaggattggatggccaaatgcaccaattcttatacaagattttgaaactcttccaagagaagcaccagatttagttcttcaaagatgttgctctggagaaggtttacaaatacctacattatcaccagctcctgattgtagtcaaccattagacgttatactacttttagatggttcatcatcatttccagctagttactttgatgaaatgaaatcttttgcaaaagcttttatatcaaaagcaaatataggtccaagacttacacaagtttcagtattgcaatatggttcaataactactatcgatgttccatggaatgttgtaccagaaaaggcacatcttctttctttagttgacgtaatgcaaagagaaggtggaccatcacaaattggagatgccttaggatttgcagttagatatttgacatcagaaatgcatggagcacgacctggagctagtaaggcagtagttattttagtaacagacgtatcagttgattcagtagatgcagctgcagatgctgctagatctaaccgtgttacagtttttccaattggaattggtgatagatatgatgcagctcaattaagaattcttgcaggacctgcaggtgattcaaatgtagttaaattacaaagaattgaagatttaccaactatggtaacattgggtaattcatttcttcataaattatgttctggtttcgttagaatttgtatggatgaagatggtaatgaaaagagaccaggtgacgtttggactttgcctgatcaatgtcatacagtaacttgtcaaccagatggtcaaacattattaaaaagtcatagagtgaattgtgatagaggattaagaccatcttgtccaaattcacaatcaccagtaaaagttgaggaaacttgtggatgtagatggacatgtccatgtgtttgtacgggatcatccacacgtcatattgttacatttgatggacaaaattttaaacttacagggtcatgttcatatgttttatttcaaaataaagaacaagatcttgaagttatattacataatggagcatgttctccaggagcaagacaaggatgcatgaaaagtattgaagtaaaacattctgctttatcagtggaattacatagtgatatggaagttacagtaaatggaagacttgttagtgtaccatacgtcggaggaaatatggaggttaatgtttacggggctattatgcacgaagttcgttttaatcatcttggacatatatttactttcacaccacaaaataatgaatttcaattacaattatcaccaaagacatttgctagtaagacttatggtctttgtggaatatgtgatgagaatggagcaaacgacttcatgttacgagatggaacagttacaactgattggaaaactcttgtgcaagaatggacagttcaaagaccaggtcaaacatgtcaaccaattttagaagaacaatgcttagtaccagattcaagtcattgtcaagttttattacttccactttttgcagaatgtcataaagtattagctccagctactttttatgcaatttgtcaacaagattcttgtcatcaagaacaagtatgtgaagtgattgctagttatgctcatttgtgtagaacaaatggagtttgtgttgattggagaacaccagatttctgtgctatgagttgtcctccaagtttagtgtataatcattgtgaacacggatgccctaggcattgtgatggaaatgtaagttcatgcggagatcatccttcagaaggatgtttttgtccaccagacaaagttatgttagaaggttcttgtgtaccagaagaagcatgtacacaatgtattggagaagatggggttcaacatcaatttttagaagcatgggttccagatcatcaaccatgtcaaatttgtacttgtctatcaggtagaaaggttaattgtactactcaaccatgtccaacagctaaagctccaacatgtggattgtgtgaagttgctagattacgtcaaaatgctgatcaatgttgtcctgaatatgaatgtgtatgtgatccagtatcgtgtgatttaccaccagttccacattgtgaacgaggattacaaccaactttgacaaatcctggagaatgtagaccaaattttacatgtgcttgtagaaaggaagaatgtaaaagagtcagtccaccaagttgtccaccacatagattaccaacacttagaaaaacacaatgttgtgacgaatatgaatgtgcatgtaattgtgttaatagtactgtttcatgtccattaggatatttagcaagtactgctaccaatgattgtggatgtacaactacaacatgtttaccagataaagtttgtgttcatagatcaactatatatccagttggacaattttgggaagaaggatgtgatgtttgtacatgtacagatatggaagatgctgttatgggtttaagggttgctcaatgtagtcaaaagccttgtgaagattcttgtagatcaggtttcacttatgttcttcatgaaggagaatgctgtggtagatgtttaccatctgcatgtgaagttgttacaggaagtccaagaggagatagtcaaagttcatggaagtcagttggttctcaatgggcaagtccagaaaatccttgtttaattaatgaatgtgttagagttaaagaggaagttttcatacaacaaagaaacgtttcatgtccacaattagaagttccagtatgtccatcaggttttcaactttcttgtaaaacaagcgcttgttgtccaagttgcagatgtgaaaggatggaagcttgtatgttaaatggtacagttattggtcctggaaaaacagttatgattgatgtttgtacaacttgtcgttgtatggttcaagtaggggtaatttcaggatttaagctagaatgccgaaaaacaacatgtaatccatgtccattaggatataaagaagaaaataatacaggtgaatgttgtggaaggtgtttacctacagcttgtacaattcaattaagaggaggacaaattatgacattaaagagagatgaaacgcttcaagatggatgtgatacacatttttgtaaagttaatgaaagaggagaatatttttgggaaaaaagagttactggatgcccaccatttgatgagcataagtgtttggctgaaggaggaaaaattatgaagatcccaggaacttgttgtgatacttgcgaagaaccagagtgtaatgatattacagcaagattacaatatgtcaaagttggttcatgtaaatcagaagttgaagttgatatacactattgtcaaggtaaatgtgcatcaaaggcaatgtactctattgacatcaacgatgttcaagaccaatgctcatgttgttctccaacaagaacagaaccaatgcaagttgcattacattgtacaaatggatcagttgtgtatcatgaagtacttaatgctatggaatgtaagtgttctccaaggaagtgttcaaaa

SEQ ID NO: 21328 - DNA, 8439 bp, synthetic construct
  misc_feature 1..8439: note = source = /note="Description of Artificial Sequence: Synthetic coding sequence"
  source 1..8439: mol_type = other DNA
atgatccctgcacgatttgctggcgtgcttcttgcccttgcactgatccttccgggaactctctgtgctgaaggtaccagaggtcggtcgtcaaccgcacgatgtagcctctttggtagcgattttgtgaacaccttcgatggatccatgtacagcttcgcgggatactgcagctacctcctcgccggagggtgccagaagagatcctttagcattatcggtgacttccaaaacggtaagagggtcagcctcagcgtgtatctgggagagttttttgacattcatctcttcgtgaatgggaccgtgactcaaggtgatcagcgtgtgtcaatgccgtacgcatccaagggtctttacttggaaaccgaagcaggttactacaaactttctggagaagcctacggattcgttgcaagaattgatggctcgggcaactttcaagtgcttctgtcggatcgttactttaacaagacctgtggcttgtgtgggaacttcaacattttcgcagaagatgatttcatgacccaggaagggactctcacctcggatccctacgattttgccaactcatgggccctgtcctccggagaacagtggtgtgaaagggccagcccaccaagctcatcatgtaacatctcatccggagagatgcaaaagggcctttgggagcagtgtcagctgcttaagtcgaccagcgtgtttgcacggtgtcaccctctggtggatccagaaccatttgtcgccctttgtgaaaagactctctgtgaatgtgcaggaggccttgaatgtgcgtgccctgcacttcttgagtacgcccgcacgtgcgctcaggaaggaatggtcctgtacgggtggacggatcattccgcctgtagccctgtctgtccagccggaatggagtaccgtcagtgtgtgtccccatgtgcaagaacgtgtcaatccctccatatcaatgagatgtgccaagaaagatgtgtcgacggatgctcgtgcccggaagggcagctcttggatgagggattgtgcgtggaatcaaccgagtgcccttgtgttcatagcgggaagaggtatccgcctggaacctcactttccagagactgtaacacctgtatttgtaggaactcccaatggatctgctccaacgaagagtgtccaggtgaatgcctggttaccggtcaatcgcactttaagtcctttgacaatcgttacttcacttttagcggtatctgccagtacctgcttgcccgcgactgtcaggatcattctttttcaatagtgattgaaaccgttcagtgtgcggatgaccgcgacgcagtgtgtacgcgaagcgtgaccgtgagacttcctgggcttcacaatagccttgtgaaactcaagcatggtgcaggcgtggcaatggatgggcaggatgtccagctcccccttctgaaaggggatcttagaattcaacataccgtgactgcctcggtgaggctctcctacggagaagatctccagatggattgggatgggcgaggaaggcttctggtcaagctgtccccggtctacgcgggaaagacgtgcggactgtgcgggaactacaatggtaaccaaggggacgactttctgactccatcaggtcttgcagagcctagggtggaggatttcggaaacgcgtggaaactgcatggtgattgtcaggatcttcaaaagcagcactctgacccatgtgcgctcaaccctcgcatgactcgtttctcagaagaagcatgcgcagtgctgacctcgccaaccttcgaagcctgtcacagggccgtctcccccctgccctatctgagaaactgtcgctacgatgtctgcagctgttccgacggacgggaatgcctgtgtggagcgctcgcatcgtacgcagcagcatgtgcaggccgcggtgtccgagtggcatggcgtgaacccggcagatgtgagctgaattgtcctaagggccaagtctacctgcaatgtggaactccctgtaatcttacttgtaggtccctttcctacccggacgaggaatgtaacgaggcatgtctggaaggatgtttttgtccaccgggtctttacatggatgaacgaggagactgtgtgccaaaggcccagtgcccatgttactacgacggtgagatctttcaaccagaagatatcttttcagatcatcacactatgtgttactgtgaagatggatttatgcattgtaccatgagcggagtgcctggctcactgctgcctgatgcagtcctgtcatccccgctgtcccataggtccaaaagatctcttagctgccgccctccaatggtcaaactggtgtgtcccgcggacaaccttagggcagaagggcttgaatgcactaaaacttgtcaaaactacgatctggaatgtatgtcaatgggttgtgtgtcggggtgtctctgtccacctggaatggtgcggcatgagaatcgatgtgtcgcactggagcgatgtccatgttttcatcaaggtaaggaatacgctccaggcgaaaccgtcaagattggatgcaacacctgcgtgtgccaagacagaaagtggaactgcactgaccacgtctgcgatgctacttgttcaacgataggaatggcacattacctgactttcgatggactgaagtatctgtttccgggcgaatgccagtacgtgcttgtgcaagattactgtgggtcgaatcccggaacctttaggatactggtgggtaacaagggctgttcccacccatcggtgaaatgcaaaaagagagtcactatccttgttgaaggtggtgaaatcgaactctttgacggtgaagtgaatgtgaagcggcctatgaaggacgagactcattttgaagtggtggagtccggtcggtacataattcttctcctgggtaaagccctgagcgtggtgtgggaccggcatctgagcattagcgtcgtcctcaagcagacctaccaagaaaaggtttgtggtctgtgcgggaattttgacggaattcaaaacaatgaccttacgtcatccaatctccaagtcgaagaagatccggtggactttggtaactcgtggaaggtgtcaagccaatgcgcggatacgcgcaaggtgcctctcgattcctcccctgccacctgtcataacaacatcatgaagcaaactatggtggattcctcgtgtagaatcctcaccagcgacgtgtttcaagactgtaataagctcgtggacccagaaccgtacctggacgtgtgtatctacgatacgtgtagctgcgagtccataggtgattgcgcatgtttttgtgacactattgccgcatacgctcatgtgtgtgcgcagcacggaaaggtggtgacctggcgtaccgcaaccttgtgtccacaaagctgtgaagaacggaaccttagagagaacggatacgagtgtgagtggcgttacaactcttgtgcacctgcatgtcaagtcacctgccaacatccggaacctctcgcatgtccagtccaatgcgttgaaggatgtcacgcccattgtccacccggcaagatactcgacgagctgcttcaaacttgtgtcgatccagaagattgtccagtttgcgaggtggcggggagaaggttcgcttcgggtaagaaggtgactctcaatccatcagatccagagcattgtcagatctgtcattgtgacgtggtgaatctgacttgtgaagcctgtcaggagcccggaggtctggtggtcccacctaccgatgcacctgtgtcaccaaccaccctgtacgtggaggatatttcggagccacctctgcatgacttctactgttcacggctgcttgatctcgtgtttttgctggatggttcgtcgcgcctttctgaagctgaatttgaagttctcaaagcatttgtggtggacatgatggagcggttgcgcatttcgcagaagtgggtgcgggtcgcggtggtggagtaccatgatggttcgcatgcatacattggattgaaggatagaaaaagaccatcggaactgcggaggatcgcgtcgcaggtgaagtacgccggatcccaagtggcatccacttccgaggtgctgaaatacacgctctttcagatattctcgaaaattgatcgcccggaagcgtcccgcattaccctgcttctcatggcatcccaagaaccccaaagaatgtcccggaatttcgtcagatacgtgcaagggttgaaaaagaagaaggtgatagtcattccagtgggaattggtccacacgcaaacctcaagcagatccggctcattgaaaagcaagccccagagaataaggcattcgtccttagctccgtggatgaacttgaacaacagcgggacgagattgtgtcgtacctctgcgatctcgctccagaagcacctcctcccactcttccacctgacatggcgcaagtgactgtgggtccaggccttttgggcgtgtcgactctcggaccaaagcgtaattcgatggtgcttgacgtcgctttcgtgctcgaaggctccgataagatcggcgaagcagacttcaatagatcaaaagagttcatggaagaggtgatacagcgcatggatgtgggtcaagattccattcatgtgactgtcctgcagtactcgtacatggtgactgtcgaatacccttttagcgaagcgcaatcaaaaggagacattcttcagagggtgagagaaattaggtaccaaggaggaaatcgaaccaacactggcctggccctccgctacctgtccgaccactcgtttctggtgtcgcagggagatagggaacaagcacccaaccttgtctacatggtcacgggtaatcccgcgagcgatgagatcaaacgtctgccaggcgacatccaggtggtcccgataggtgtcggcccaaacgcaaatgtccaagaacttgaaaggatcgggtggcctaacgcgccaatattgattcaagactttgagactcttccacgggaagccccagatcttgtgttgcaaagatgttgcagcggggaggggctccaaattcctacgctgtcccctgcacctgattgttcgcagcctcttgatgtgattctcttgcttgatggaagctcgtcctttccagcatcctactttgatgagatgaagagctttgcaaaggcgttcatctcaaaggctaatatcgggccaagactgactcaggtgtcggtccttcagtacggcagcatcaccactatcgacgtcccctggaacgtcgtcccggaaaaggcgcatcttctgtcactggtggacgtgatgcaaagggaaggtggccctagccagatcggggatgcactggggttcgcggtgcggtacctgacttccgaaatgcatggtgcgaggccaggagcgtccaaggcagtcgtcattcttgtgaccgatgtgtcagtggattcggtggatgctgcggccgatgccgcaagatctaatcgagtgaccgtgtttccaattggcatcggcgacagatacgatgcagcgcagctgaggattctggccggaccagccggggactctaatgtcgtgaaactgcaacgtatcgaagatctgcctactatggtgactctgggaaacagcttccttcacaaactttgctcgggattcgtgcggatctgcatggacgaagatggtaacgaaaaaagaccgggagatgtgtggacccttcctgatcaatgtcatactgtgacttgccaacctgacgggcagaccctgcttaagtcacaccgagtgaattgcgatagagggctcagacctagctgtcctaacagccagtcgccagttaaggtggaagaaacctgcggttgtcgctggacttgcccctgtgtgtgcacggggtcctccactagacatatcgtcacttttgatggccagaactttaagctcactggaagctgttcgtatgtgttgtttcaaaacaaggagcaagatttggaggtgattctgcacaatggggcatgctcccctggtgcacgccagggatgtatgaagtccattgaagtcaaacattccgctctgtctgtggaacttcacagcgatatggaggttaccgtgaacggacgcctggtcagcgtgccttacgtgggcggaaacatggaagtgaacgtctacggggctatcatgcacgaagtgcgattcaatcaccttggacatatctttactttcactcctcagaacaacgagtttcagctgcaactgtcccctaaaaccttcgcttcaaagacctatgggctgtgtggaatttgcgatgaaaacggcgccaacgatttcatgctgagagatggaactgtgactacggattggaaaacgcttgtccaggaatggaccgtccagcgaccaggacagacgtgccagccgattctggaagagcagtgtcttgtgcctgacagctcgcactgtcaagtgctgctcctccctctgtttgccgaatgtcacaaagtgcttgcaccagcgaccttctacgcaatctgtcaacaagactcctgtcatcaagaacaagtgtgtgaagtgatagcaagctacgctcatctttgtcggaccaatggagtgtgcgtggattggagaacccccgatttttgtgcgatgtcctgccctccttcgttggtgtataaccactgtgagcatggctgccctcgacactgtgatggcaatgtttcgtcgtgcggcgaccatcctagcgaagggtgcttctgtccaccagacaaggtgatgcttgaaggtagctgcgtgcccgaagaggcatgtactcagtgcatcggtgaggatggagtccaacatcaatttcttgaggcttgggtgccagaccatcagccatgccaaatctgtacttgcctttccggacgcaaggtcaactgtactactcagccttgccctaccgcaaaggcccccacgtgtggactgtgcgaagtcgcgagactcaggcaaaacgcagaccagtgttgcccagagtacgagtgtgtctgcgatccggtgtcatgtgacctccctcctgtgccgcactgtgaacggggacttcagccaaccctgactaatccgggagagtgtcgacccaacttcacttgtgcatgtagaaaggaggagtgtaagagggtgagccccccttcctgtccaccccatagattgcctacgctgcgcaagacccagtgttgtgacgaatacgagtgtgcatgcaattgtgttaactccaccgtgtcttgcccgctgggttacctggcatctactgcaaccaacgattgtggctgcaccaccactacctgtctgcctgacaaagtctgcgtccaccgctcgactatctaccctgtcggacaattctgggaagaaggatgtgatgtgtgcacttgcaccgacatggaagatgcagtgatgggactgagggtcgcacaatgctcacagaagccttgcgaagattcctgtcggagcgggtttacttatgtgcttcacgagggtgaatgctgtggcaggtgtctgcctagcgcatgtgaagtggtgaccggcagcccgcgtggtgatagccagtcgagctggaagtccgtgggttcacagtgggcttcgccggaaaacccatgtcttatcaacgaatgcgtccgtgtcaaagaggaagtgtttatccaacaacgcaatgtgtcgtgcccccagcttgaagtgcccgtgtgtccgagcggctttcagctgtcgtgcaagacctccgcctgctgtccttcatgtagatgtgaaagaatggaggcatgtatgctcaacggtactgttattggtcccggaaagacggtgatgatagatgtctgtaccacgtgccgatgtatggtccaagtcggggtgattagcggattcaagctggagtgccgtaaaaccacttgtaacccttgtccactcggatacaaggaggaaaacaacacgggagagtgttgtggtcgatgcctccctaccgcgtgcaccattcaacttagaggaggccagataatgacccttaagagggatgaaactctgcaagacggatgtgacactcatttttgtaaagtcaacgagaggggcgaatacttttgggagaagcgtgtgaccggatgtcctccattcgatgaacataagtgtctcgctgagggagggaagattatgaagatccctgggacttgttgtgatacgtgtgaagagcctgaatgcaacgatatcacggccagactccaatatgtcaaagtcggtagctgcaagtccgaagtggaagttgacattcactactgccaagggaaatgtgcatcgaaggctatgtactcaattgacattaatgatgtgcaggatcaatgttcgtgctgttcgcccactcggactgaacctatgcaagtggcactccattgcaccaacggatcagtggtgtaccatgaagtccttaatgcaatggaatgcaaatgtagcccacgaaaatgctcgaag

SEQ ID NO: 21329 - DNA, 8439 bp, synthetic construct
  misc_feature 1..8439: note = source = /note="Description of Artificial Sequence: Synthetic coding sequence"
  source 1..8439: mol_type = other DNA
atgatcccggccagatttgctggagtgcttctcgcgctggcgctgatcctgccagggaccctctgcgcagaaggaacccggggccgaagtagcactgccagatgctccctgttcggttcggacttcgtcaatactttcgacggatcaatgtattcgttcgctggctactgttcctacctcctggccggaggatgccagaagcgctccttctcgatcataggagacttccagaacggaaagcgcgtgtcactgagcgtctacctgggggaattcttcgacattcacctcttcgtgaacggcaccgtgacgcaaggcgaccagagagtgagcatgccgtacgcttccaagggcttgtatcttgaaactgaggctggatactacaaactgtccggagaagcgtacggatttgtggcccgcatcgacggcagcggcaactttcaggtcttgctgtcggacagatacttcaataagacgtgcgggttgtgcggaaatttcaatatctttgccgaggatgactttatgactcaggagggcactctgacgtccgacccatacgatttcgcaaactcctgggccctctcctccggtgaacagtggtgcgagcgcgcatcacccccttcatcatcgtgcaatatctcgtccggagaaatgcaaaaggggctctgggagcagtgccagctgctgaaatcaacctcagtgttcgccaggtgccatcctttggtcgatcccgagccattcgtggccctgtgcgaaaaaacgctctgtgagtgtgctggaggactcgagtgtgcttgcccagccctccttgaatacgcccggacgtgtgcccaggagggaatggtgctttacggctggaccgaccactcagcctgcagccctgtgtgtccggccggcatggagtaccggcagtgtgtgtccccgtgtgctcgaacttgccagagcttgcatatcaatgagatgtgccaggaacgctgtgttgacggatgcagctgccccgaaggccagctgctggatgaaggcctctgcgtggaatccactgaatgtccttgcgtgcattcggggaaacgttatcctccaggcacgtctctgtcacgggattgtaacacgtgtatctgcagaaattcacaatggatctgctcaaatgaagaatgccctggagagtgtctggtgaccggtcagtcgcatttcaagagctttgacaatcggtacttcactttctcgggtatctgccagtacctcttggccagggactgtcaggaccattcgttctcgatcgtgatcgagacggtgcagtgcgcagacgacagggatgcagtgtgcacccggtcagtgactgtgcggcttccgggactgcacaatagcttggtcaagctcaagcacggagccggcgtggccatggacggccaagacgtccagctgcccctgctcaagggcgacctgcggatccaacacactgtgaccgcgtcagtccggctgagctacggcgaagatctgcaaatggactgggacgggaggggacggcttctggtgaaattgagtcctgtctacgcgggaaagacctgtgggctgtgcggcaattacaacgggaatcagggagacgacttcctcaccccgtccggactggcggaaccgcgggtggaagatttcggaaatgcttggaagctgcacggcgattgtcaagaccttcaaaagcaacacagcgacccctgcgcgctgaatccgagaatgacccggttttccgaagaagcctgtgctgtgctcaccagcccaaccttcgaagcatgtcatcgggcagtgtcgccgctgccttaccttagaaactgccgctacgatgtttgctcgtgcagcgacggtcgcgagtgcctgtgcggagccctggctagctacgcggcggcatgcgccggccggggggttcgcgtcgcttggcgggaaccgggccgctgcgagttgaactgcccgaaaggccaggtttacctgcaatgcgggactccttgtaaccttacctgccggtcactgtcgtacccagacgaagaatgcaatgaggcctgtctggaaggatgcttctgcccgccgggactgtacatggacgagagaggggattgcgtgccaaaagcccagtgcccatgttactatgacggagagatcttccaaccagaggacatcttttcagaccatcacaccatgtgttactgcgaggacggattcatgcattgcacgatgtccggagtgccgggatcgctgctcccagacgcggtcctgagcagccccctgtcgcatagatccaaacgctcgttgtcgtgccgcccacctatggtcaaactcgtctgcccagcggacaatctgagagcagaaggactggaatgcaccaagacctgccaaaactacgacctggagtgtatgtccatgggatgcgtctccggctgcctctgcccgcctggtatggtcaggcatgaaaataggtgcgtcgctttggaacgctgcccatgcttccatcagggcaaagaatatgcaccgggggagactgtgaagatcggatgtaatacctgcgtatgccaggatcgtaagtggaactgcactgatcacgtgtgcgatgcgacctgctcgactatcggaatggctcactacttgaccttcgatgggctcaagtacttgtttccaggagaatgtcaatacgtcttggtgcaggattactgtgggtccaatccgggcaccttccggatcctcgtgggaaacaagggctgtagccatccctcagtgaagtgcaagaagcgggtcaccattctggttgaaggcggagaaatcgagctgttcgatggggaagtgaacgtgaaaaggccgatgaaagatgaaactcactttgaagtggtggagtcgggaaggtacatcatcctgctcctgggcaaagccctctcggtcgtgtgggacagacacctcagcatcagcgtcgtgctcaaacaaacttaccaagaaaaggtctgcggcctgtgtggtaactttgacggaatccagaacaatgatctgacctcctccaacttgcaagtcgaagaggatcctgtggatttcggcaactcctggaaggttagcagccaatgcgcggacactagaaaggtgccgctcgactcgagcccggctacgtgtcataacaacatcatgaagcagactatggtcgactcctcatgccgcatcctcaccagcgacgtgtttcaggattgtaataagttggtggatccggagccgtacctggatgtgtgcatttacgacacctgctcatgcgaaagcatcggagactgcgcgtgcttctgcgacactatcgccgcatacgcccacgtgtgcgcgcagcacggaaaggtcgtgacctggagaaccgcgaccctctgtccccaatcctgcgaagagaggaacctgcgggaaaatggatatgagtgtgagtggaggtacaacagctgcgcacctgcctgccaagtgacgtgccagcatccggaaccgctggcatgcccagttcagtgcgtggaaggatgtcacgctcactgcccccctgggaagatcctggacgagctgctgcagacttgcgtggacccggaagattgccctgtctgtgaggtcgccggaaggcggtttgcctccgggaagaaagtgaccctgaacccatcggacccggaacactgtcagatctgccattgtgatgtcgtgaatctgacctgcgaagcctgtcaagaacctggaggtctggtcgtgccgccgacggacgcgcctgtgtcaccgacgaccttgtacgtggaggatatcagcgaaccgccgctgcacgacttctattgtagtcgactgctggatttggtgttcctgctggacgggtccagccgactttcagaagcggagttcgaggtcctgaaggccttcgtagtggatatgatggaacggctgcgtatcagccagaagtgggtgcgggtggcggtggtggagtaccatgacggatcgcacgcttacatcggattgaaggacagaaagcgtccttctgagctgagacggatcgcctcgcaggtgaaatatgccggaagccaagtggcgtccacttcagaagtgctcaagtacactctgttccaaatcttttcaaagatcgacagaccggaggcttctcggatcaccctgctgctgatggctagtcaggaaccacagagaatgtcgaggaatttcgtgagatacgtgcagggactcaaaaagaagaaggtcatcgtcatccccgtcggtattggacctcacgccaatttgaagcagatccgcctgatcgagaaacaagctcccgagaataaagcatttgtgctgagctcggtcgacgagctggagcagcagcgggacgaaattgtgtcatacctctgcgatctcgctccggaagcaccgccgcctaccctgcccccagatatggcacaggtgaccgtggggccaggactgctcggcgtcagcactttgggaccaaagcgcaacagcatggttctcgacgtcgcgttcgttctggaaggatccgataagataggagaggcagactttaacagatccaaggaattcatggaagaagtgattcagcgcatggacgtcggccaggattcgatacacgtgactgtgttgcagtacagctatatggtcacggtggaataccctttcagcgaagcccagtccaagggcgacatcctgcaacgcgtgcgcgaaatccgctaccaaggggggaaccgaactaacactggacttgcactgagatacctgtcggaccactcgttcctcgtctctcagggcgaccgggaacaagctcccaatttggtctatatggtaactggaaatcctgcaagcgatgaaatcaaacggctcccgggagatattcaagtcgtgccgatcggagtggggccaaacgcgaacgtccaggaactggaaaggatcggttggcctaacgcccctatcctgatccaggacttcgaaaccctgccacgcgaagcaccagacctggtgctccagcggtgctgctcaggagaaggactgcagatcccgacgctgtctcctgccccagactgtagccagccgctggacgtcatcctcctcctcgacggaagctcatccttcccagcgagctacttcgacgaaatgaagtcgtttgccaaggctttcatttccaaggcaaacatcggtccccggttgacccaagtctcggtgctgcaatacggatcaatcactaccattgacgtgccgtggaatgtggtgccagaaaaggcgcacctgctgtcactggtggatgtcatgcaacgggaagggggcccaagccagattggggatgctcttgggttcgcagtccgatacctgacttccgagatgcacggagctcgcccgggagccagcaaggcggttgtgattctggtgacggacgtgagcgtggatagcgtcgatgccgcggccgatgctgcacgctcgaaccgggtgaccgtgttcccgatcggtattggagatcgctacgacgcggcacaactcagaatcctggcgggaccggccggcgacagcaatgtcgtcaaactgcaacgcatcgaagatctgccaactatggtcaccttgggcaactccttcctccacaagctgtgctcgggcttcgtgaggatttgtatggacgaggacggaaacgagaagcggcccggggacgtctggacccttccagatcagtgccataccgtgacttgccagccggacggtcaaacccttctgaagtcgcaccgggttaactgcgacagaggcctgaggccttcctgtccaaactcacagtcgccggtgaaagtggaagaaacctgtggctgtagatggacttgtccatgcgtgtgcactggatcgtctacccgccatattgtgactttcgacggccaaaactttaagctcactggctcctgctcatacgtgctgttccaaaacaaagagcaagatctggaagtgatcctgcataacggtgcctgctccccaggggcaagacagggttgcatgaagtccattgaggtaaaacactccgcgctgagcgtggagctccatagcgacatggaagtgaccgtgaatggcagactcgtgtcggtgccgtacgtgggaggcaatatggaggtgaatgtgtacggtgccatcatgcacgaggtccggttcaaccacctgggacacatattcaccttcaccccgcagaataatgaatttcagctccagctctcaccaaagactttcgccagcaagacttacggtctgtgcggaatctgcgatgagaatggcgctaacgacttcatgctcagggatggtactgtcaccacggactggaaaaccctggtgcaggaatggactgtgcagcggccgggacaaacttgccagcccatccttgaggaacaatgcctcgtgccagactcctcacactgccaggtgctcctgctgccactgttcgcggagtgccataaggtgctcgccccggccacgttctacgccatctgccagcaggattcgtgccatcaagaacaggtatgcgaagtgatcgcgtcttatgcacacctctgccgcaccaacggcgtttgcgtcgactggcggacgccagacttctgcgcgatgtcttgcccgccgtcccttgtgtataatcattgcgagcacggatgcccacgccactgcgatggaaacgtctcgtcatgcggcgaccaccccagcgagggttgtttctgccccccggataaagttatgctcgagggaagctgcgtgccagaagaggcttgcactcaatgcataggggaagatggggtccaacaccagtttctcgaggcctgggtcccggatcaccagccatgccaaatctgcacttgtctgtcgggaaggaaggtcaattgcactacccagccgtgtccgactgcaaaggcacctacttgcggcctgtgcgaagtggcacggctgcgccagaatgccgaccagtgctgcccagaatatgagtgtgtctgtgacccggtgagctgtgatctgccgccagtgccgcactgcgaaagggggctccagcccactctcaccaacccgggcgagtgtaggcctaacttcacctgtgcttgccgcaaagaggagtgcaagcgcgtctcaccaccatcctgcccgccgcaccgattgccgaccctccggaaaacgcagtgttgcgacgaatacgagtgcgcatgtaactgtgttaattcaaccgtgtcgtgcccactgggatacctggccagcaccgcgaccaacgattgcggatgcactacgaccacctgcctcccagataaggtgtgtgttcaccgctcaacgatctaccccgtcggacaattctgggaagagggatgcgatgtgtgcacctgcaccgatatggaggatgccgtgatgggactgcgcgtcgcacagtgcagccaaaagccgtgcgaggactcatgtaggtcaggattcacttacgtgctccacgagggtgaatgctgcggacggtgcctgccaagcgcgtgcgaagtggtgactggatccccgaggggcgactcgcagtcgagctggaagtcggtggggagccagtgggcatccccagagaacccatgcttgatcaacgagtgtgttagagtcaaggaagaagtgttcattcaacagcgcaacgtgtcgtgtccacagctggaagtcccggtctgtccgtccggattccaactctcctgcaagacttcagcctgctgccctagctgtcggtgcgagagaatggaggcatgcatgctcaacggaacggtgatcggcccaggcaagactgtcatgatcgatgtgtgtaccacctgccggtgcatggtgcaggtgggagtgatttccggattcaagctcgagtgccgcaagaccacgtgcaacccatgcccgctgggatacaaagaggagaacaacactggtgagtgctgtggtcggtgcctgccgaccgcctgcaccatccagcttagaggcggccaaatcatgacgctcaaacgagacgagacgctccaggacggctgcgacacccacttttgtaaagtgaacgagcgcggcgaatacttctgggaaaagcgcgtgaccggctgtccgccgttcgatgagcataaatgcctggctgaaggaggtaagattatgaaaatcccgggaacctgctgcgatacctgcgaagagccggaatgcaacgacatcaccgcccgcctgcaatacgtcaaagtgggtagttgcaaaagcgaggtggaggtggacattcactactgccaggggaagtgcgcttccaaagctatgtacagcatcgacatcaatgatgtgcaagaccaatgcagctgctgctcgccgacgcgcaccgagccgatgcaggtggccctgcactgtactaatggatccgtggtgtaccatgaggtcctcaacgccatggagtgcaaatgttccccgcgcaaatgctcgaaa

SEQ ID NO: 21330 - DNA, 8439 bp, synthetic construct
  misc_feature 1..8439: note = source = /note="Description of Artificial Sequence: Synthetic coding sequence"
  source 1..8439: mol_type = other DNA
atgatccccgcaaggttcgctggcgtgctcctggcgctagcactaatcctccccggaaccttgtgcgcggagggaactcgtggcaggagctccaccgcacgatgttcgctattcggatctgacttcgtcaacactttcgatggatctatgtattctttcgctggctactgctcgtacctccttgccggcggttgtcagaagcgctcattttcgattataggagattttcaaaacggtaagagagtgagcctgtctgtctatcttggggaatttttcgatatccacttgtttgtgaatggaaccgtgacccaaggtgatcagcgcgtaagcatgccctacgcgagtaaaggcctgtacttggagactgaagcgggctattacaaactatccggagaggcgtacggttttgtcgcacggattgatggctccggcaatttccaggtcttgttatcggatcggtacttcaataaaacgtgcggcctatgtggtaactttaacatcttcgccgaggatgatttcatgactcaggagggcacactaacgtctgatccttacgacttcgccaactcatgggcattgtcctcaggtgagcagtggtgtgagcgagctagccccccgagctcgtcgtgtaacattagttcgggcgagatgcagaagggcttgtgggagcagtgccagcttcttaaatcgacgtccgtgtttgcacgttgtcatcctttggtggatccggaaccgttcgtggctctgtgcgaaaagacgttgtgcgagtgtgcagggggtttggagtgcgcctgccctgcgctcttagaatacgcccgaacctgtgctcaagagggtatggtcttatacggatggactgaccactctgcatgctccccagtctgcccagcaggaatggaataccgccagtgcgtcagtccctgtgctcgaacctgtcagtccttgcatatcaacgaaatgtgtcaagaacggtgcgttgatggttgcagctgtccggagggccaattacttgatgaaggattgtgtgtcgaaagcacagaatgcccttgtgtccactccggcaagaggtatcctcctgggacttcactaagccgggattgtaacacctgtatctgtcgcaactcgcagtggatctgttctaacgaggagtgtcctggggaatgtctagtaaccggccagagtcacttcaaatccttcgacaatcgttactttactttctccggtatatgccaatatctcctagccagagattgtcaggaccatagcttttcgatcgtgatcgaaaccgttcagtgcgcagacgatcgcgacgcagtctgtacgagatcagttacagtccgtctgcctggcctgcataacagcctggttaagctgaagcacggagcaggtgtggcaatggatggccaggatgtccagttacctctcctgaagggagacctgcggattcagcacacagttacagcttcagtccgcctgtcgtatggagaggacctacagatggattgggatggtaggggcaggcttcttgtcaagctgagccctgtgtatgccggtaagacgtgtggcctttgcggaaattataacggcaaccagggagatgacttcctcaccccctctggccttgccgagccgcgtgtggaagatttcggtaacgcatggaagttgcacggcgactgccaagacctgcaaaagcagcatagtgacccttgcgctcttaatcctaggatgactcgtttctcggaggaggcctgtgctgttctaacctcgccaacatttgaagcatgtcaccgggcggtctctccgctaccatacttgcgtaattgcaggtatgatgtatgctcttgttcagatggccgggagtgcctgtgtggtgcccttgcctcctacgcagctgcttgcgctggacgcggcgtgcgagtggcctggagggagccgggaaggtgtgaactcaactgtcctaagggacaggtctacctccagtgcggcaccccatgtaatctgacgtgccggtccctgtcttatccagacgaagagtgcaacgaggcctgtctcgagggatgcttttgtcccccgggtctctatatggacgaacgcggtgactgcgtcccaaaagcccagtgtccctgctattatgatggtgaaattttccagccggaggacatcttctctgaccatcatacaatgtgctattgtgaggacggatttatgcattgtactatgtccggcgtaccgggatccttgctacctgatgcggtccttagtagccctttatcgcatcgtagcaagcgttctctttcttgtcgaccccctatggttaagctggtctgcccagcagacaacttacgagcggagggtttggagtgtaccaagacctgccagaactacgacttggaatgtatgtcaatgggctgtgtgagcggctgtctgtgcccgccgggaatggtccgacacgaaaataggtgtgtggccctggaacgttgtccctgttttcaccaaggtaaggagtatgcacctggcgaaaccgtgaagatcggatgtaatacgtgtgtgtgtcaagaccgtaagtggaactgcaccgaccacgtttgcgatgccacttgttccaccatcggcatggcgcactacctaacattcgacggacttaagtacctctttccgggggaatgccagtatgtcctggtgcaagattactgtgggtccaatccaggcacttttcggattctagtcggcaacaaggggtgctcgcatccgtctgtaaagtgcaagaagagagtaacgattctcgtcgaaggtggggaaattgaactgtttgatggtgaggtcaacgtcaaacgccccatgaaggatgagacccattttgaagtcgtcgaaagtggcaggtatatcatactattgctcgggaaggccctctccgttgtgtgggatcggcatctaagcatcagtgtcgttctaaagcaaacatatcaggaaaaagtgtgtggcttatgcgggaactttgacggtattcagaacaatgatctgacttcttcaaacctccaagtagaggaggacccagttgactttggcaactcttggaaggtatcgagtcaatgtgcggataccaggaaagtgcccctggatagttcccccgccacgtgccacaacaatattatgaagcagaccatggtggattctagctgcaggatcttgacctccgatgttttccaggattgcaacaagctggttgatccggagccgtacctggatgtgtgtatatacgatacctgctcctgcgagtctattggtgattgcgcttgcttctgtgatacgattgccgcttatgcccacgtgtgcgcccaacacggcaaggtcgtgacgtggcgaacagccacactttgcccgcagagctgtgaggagcgcaatttgcgcgagaacggctatgagtgcgaatggcgttataattcgtgcgctcccgcatgccaggtcacgtgccaacatccggaacctctcgcatgtcccgttcaatgtgtagagggttgccatgcacattgccctcctggtaagatcctggacgagcttctacagacatgcgttgacccagaggactgccccgtctgcgaagtagccggtcgcagattcgcgtccggcaaaaaggtcactctgaatcctagtgacccagaacactgccaaatctgtcactgtgatgtggttaatctgacttgcgaggcatgccaagaacctggcggactggtggtgccacctacagacgcgccagtgagtcccacaacgttatatgtagaagatatttcggagccccctttgcacgacttttactgttcccggttgctagatcttgtattcctccttgacggttccagtcgattaagtgaggccgagttcgaggttctgaaagccttcgtcgtggacatgatggaaaggttacgaatttcccagaagtgggtcagagttgcagtcgttgagtaccatgatggttctcacgcttacattgggttaaaagacaggaagaggccctccgaattaaggcgaatcgcatcccaagttaaatacgcgggcagccaggttgcttctacatcggaggtactgaagtataccctttttcaaatcttcagtaagattgacaggccggaggcaagtcgaattactctactgttgatggcaagccaggagccgcaaagaatgagtcgcaacttcgtccgttacgtccaggggcttaagaagaagaaagtcattgtgatacctgtgggcatcggtccacacgccaatctgaaacaaattcgcctgatcgaaaagcaggcaccggagaacaaggcatttgtgttatcatcggtggatgagctcgagcagcaaagagacgagatcgtctcatatctctgcgatctagccccagaagctcctccacctactcttccacctgatatggcgcaagttaccgtcggaccgggtcttctcggcgtgagcaccttgggaccgaagaggaacagtatggtattagatgtggcgttcgttctggagggctccgacaagatcggtgaggctgacttcaacagatcgaaggagtttatggaggaagttatccaaaggatggatgttggccaagactcgatccatgtcacggtgctgcagtactcctatatggtgacggttgagtaccccttctccgaagcccagagcaaaggcgatattctgcagcgcgtgcgtgagattaggtatcagggtgggaaccgtacaaatacggggttggccctccgctatttgtcggatcacagcttcctagtttcacaaggcgatcgtgagcaggctcctaacttggtgtacatggtcaccggcaacccggcttcggacgaaattaaaaggctgcctggtgatatacaagtggttccaatcggggtcggtccaaacgctaatgttcaggaacttgagcgcataggctggcccaacgcgcctattttgattcaggatttcgaaacacttccacgggaagcgccagacctggtcctgcagaggtgttgctcaggcgaaggattacagattccaacgctgtctccagcgcctgattgtagccaacctctagacgtaattctacttcttgacggaagttcgtcttttcccgccagctacttcgacgaaatgaagagcttcgcgaaggctttcatcagtaaggctaatatcggccccagactgacccaggtgtcggtacttcagtacggctcgattacaacaattgacgtcccttggaatgttgtccctgaaaaggcgcatttgctaagccttgttgatgtcatgcagcgggaagggggccctagtcaaatcggagacgcacttggatttgcggtgcgttacctaacctctgagatgcacggagcccggcccggagcctcaaaggctgtcgttattctcgttactgatgtgagtgttgactccgttgatgcggcagctgatgctgcccggtccaaccgagtcactgtgtttcccatcggaatcggcgaccgatacgatgccgcacaattgaggattttggctggaccagcgggagattcgaatgttgttaagctccaacggattgaggacttgcctactatggtgactctgggtaactcgtttttgcataaactgtgttcaggcttcgttaggatctgcatggatgaggacggaaatgagaagagaccgggagatgtatggacactaccggaccaatgccataccgttacgtgccagcctgatggacagacgttgctgaaaagccatcgggtgaactgtgataggggattgcgccccagttgccctaatagccaatccccggtgaaagttgaagaaacatgtgggtgccgatggacctgtccctgtgtctgcacggggagcagtactcgacacattgtaacctttgatggacagaattttaagctgaccggatcgtgctcttatgtcctatttcagaataaggagcaggatctggaggtgatcttgcataatggggcctgctcaccgggcgcgcgtcaggggtgcatgaagtcgatcgaagtcaaacatagtgcgttgagcgtagaattacactcggatatggaggtaacggtaaacgggagattggtgtcggtcccgtacgtgggtggtaacatggaggtcaatgtttacggcgcgattatgcatgaagtgcgatttaaccatttggggcacatctttacatttacccctcagaataatgagtttcaactacaactttcgcccaagacttttgcttcaaagacatatggtctgtgtggaatctgtgatgaaaatggggcaaacgatttcatgttgagggacggcactgtcactacagactggaagacgttagtgcaggagtggacagttcagcggccgggacaaacctgtcagcctatccttgaggaacagtgtctagtacccgattcatctcattgtcaagtgctactgttgcctttgttcgctgaatgccataaagttctggctccggccacgttctacgcaatctgccagcaggattcttgccaccaggaacaagtctgtgaagttattgcctcatatgctcacctctgtcgcacaaacggcgtttgtgttgactggcgcacccctgatttttgtgcgatgtcttgccccccaagccttgtttacaaccactgtgaacatgggtgtcctcggcactgcgacggtaacgtcagttcttgtggggaccacccctccgagggttgtttttgcccgcccgacaaggtaatgctcgaagggagttgcgtgccggaggaggcatgtacccaatgcattggagaggatggagtccaacatcaattcctggaagcatgggttcccgaccaccagccatgtcagatttgtacttgcctaagcggccgtaaagttaattgcacaacccaaccttgccctacggccaaggcccccacatgcgggctctgtgaggtcgcacgacttcgccagaacgctgatcagtgctgtcccgaatacgaatgtgtgtgcgaccctgtatcatgtgatcttccgcctgtcccacattgcgaacgcggtctgcaacctacgctaactaatcctggcgaatgtcggccaaattttacatgtgcttgccggaaggaagagtgcaagcgggtgtccccaccatcctgccctcctcatagactacccacactgcgtaagacgcagtgctgcgacgaatacgaatgtgcttgcaactgcgtcaatagtacggtgagctgcccccttggttacctcgcctccacagctacgaacgactgcggttgcactacaaccacatgtttgccggataaggtctgcgtgcatcggtcgactatttaccctgtgggtcaattttgggaagaggggtgcgacgtatgcacctgtacagacatggaagacgctgtaatgggccttagagtggcacaatgcagtcaaaaaccatgtgaggattcatgtcgaagcgggttcacatacgtgttgcatgaaggcgaatgctgtggacgctgcttgccctctgcctgtgaggtcgtcactggatcgccacgcggcgacagccagtctagctggaaatctgtcggatcgcaatgggcttcccccgaaaatccgtgtttaatcaacgaatgtgttagggtgaaggaggaggtattcattcagcagcgcaacgtgtcgtgtccacaactggaggttcctgtttgtcccagtggatttcagctttcgtgcaagacaagcgcatgctgtccatcatgtaggtgcgagcggatggaagcgtgtatgttgaatggtacagttattggccctggcaagaccgttatgatcgacgtctgtactacgtgccgttgcatggttcaagttggtgtcatttcgggatttaaattggagtgccgtaagacaacttgtaacccatgccccctgggttacaaggaggagaataatacaggtgagtgctgtggccgctgcctgcccacggcttgcaccattcagctacggggcggacaaatcatgaccttgaagagagacgaaacactccaggacggatgcgacacgcatttctgcaaagttaatgagcgaggggagtacttctgggagaagcgagtcactggctgtcccccattcgacgagcacaaatgcttagccgagggaggaaagataatgaagataccggggacctgctgtgacacctgcgaggaaccagaatgtaatgatataacagcccgtctacagtacgttaaggtgggctcgtgcaagtccgaggtggaagtcgacatccactactgccaggggaagtgcgcatctaaggctatgtacagcatagacataaacgatgtgcaagatcaatgttcatgttgctcaccaactcggactgaaccgatgcaagttgcgttgcattgtactaacggatccgtcgtgtaccatgaggtgttaaacgccatggaatgcaagtgcagtccgcgcaagtgttcaaag

SEQ ID NO: 21331 - DNA, 8439 bp, synthetic construct
  misc_feature 1..8439: note = source = /note="Description of Artificial Sequence: Synthetic coding sequence"
  source 1..8439: mol_type = other DNA
atgattccggccaggtttgcaggcgtgctgctggcacttgcactcatcttgccaggaactctctgtgcagaggggaccaggggtcgatcctccactgcacggtgtagcctgttcgggtcagatttcgtgaacacttttgacggttcgatgtactcgttcgcaggatactgcagctatctgctcgctggcggatgccagaaacgctcgttttccataatcggagactttcagaatggtaaaagggtgtcgctgtcggtgtacctcggcgagttttttgatattcacttgttcgtgaacggtacggtcacccagggcgatcaacgtgtgagcatgccatatgcctccaaaggactgtatctcgaaaccgaggcggggtactacaaactttcgggggaagcatacggatttgtggcccgtatagacggttccggcaactttcaggtgctcctttcagaccgctactttaacaagacctgtggcctctgcggtaatttcaacatctttgctgaggacgactttatgacccaggaaggaaccttgacctctgatccttacgactttgcaaactcctgggcactctccagcggtgagcagtggtgcgaacgggcaagcccaccctcatcgtcgtgtaatatctcgtcgggtgaaatgcaaaaaggattgtgggagcaatgccagctccttaagtccacgtcggtgtttgcccgatgtcatcctcttgtggatcctgagcctttcgtggcactttgtgaaaagaccctgtgtgaatgcgccggagggctggaatgtgcctgcccggcgctcctcgaatacgcgcgtacctgcgcacaagaagggatggtcctgtacggatggaccgatcactccgcatgctcgcccgtgtgtcctgccggcatggagtaccgccagtgcgtctcaccctgcgcacgtacttgtcagtcgctgcacattaacgaaatgtgtcaagaacgctgtgtggatggatgtagctgtcctgaaggtcaactcctggatgagggtttgtgcgtggaatccacggaatgtccctgcgtccatagcggtaagcgctaccctccaggtactagcctgtcgagagattgcaacacctgtatctgtaggaattcgcaatggatttgttccaatgaggaatgccctggtgaatgcctggtgaccgggcagagccactttaagtcatttgataaccgatactttaccttctccggcatatgtcaataccttctggctagagactgtcaggatcactcattctccattgtgatcgagacggtgcaatgtgccgatgatcgggatgcagtttgtactcgctccgtcaccgtgagactccccggccttcataatagtctcgtgaagctgaagcatggagcgggagtcgcaatggatgggcaggatgtgcagctgcccctgctgaagggtgaccttcgaatccaacatactgtgacggcctcagtgcgactgagctacggcgaggatttgcaaatggattgggatggaagaggacggctgctggtcaaacttagcccagtgtacgcaggaaaaacctgtggactttgcggaaattacaacggcaaccaaggggatgatttcctcaccccaagcggccttgcagagccaagagtggaagatttcggtaacgcttggaagctccatggagattgccaagaccttcagaaacagcattccgacccatgcgcgctgaatccccggatgacccggtttagcgaagaagcctgtgcagtgctgacctccccaacgtttgaggcctgtcaccgtgctgtgagccctctcccctaccttcgcaattgtagatacgacgtttgtagctgctcggacggacgggagtgtctttgcggagcactggcgtcgtacgcagcagcctgtgccggcagaggagtgcgggtcgcgtggagagagcccggacgatgtgaactgaattgtccaaagggccaagtctacctgcagtgcggaacgccttgcaacctgacctgtagatccctgtcctaccctgacgaggaatgtaacgaggcatgtttggagggttgtttttgtcctccaggactctatatggacgaacgcggtgactgtgtgcccaaagctcaatgcccttgttactacgatggtgagatattccagccagaggacatcttttccgatcaccataccatgtgctactgtgaggacggttttatgcattgtaccatgtccggcgtgcctggctcccttctcccagacgcagttttgtcgtccccactctctcacaggagcaagagatcccttagttgccgtccccccatggtgaagctggtgtgccccgcggataacctgcgagccgaaggtcttgaatgtactaagacctgccagaactacgatctggagtgtatgtccatgggctgtgtgagcggatgcctgtgtcctcctggtatggtccggcatgagaatagatgcgtcgcacttgaaagatgtccgtgctttcatcagggtaaagaatatgctcctggagaaaccgttaagattggctgcaatacctgtgtgtgtcaagatagaaaatggaactgtactgatcacgtgtgtgatgcaacctgttccaccatcgggatggcacattacctgaccttcgatgggcttaagtacctcttccctggtgagtgtcaatacgtcctggtgcaggactattgtggatcaaacccaggtacttttcgtatccttgtgggaaataagggttgcagccatccatcagtaaaatgtaagaagagggtcaccatcctcgtggaaggaggagagattgagctgtttgatggggaagtcaacgtgaaaagacctatgaaggacgaaacgcactttgaagtggtggagtcgggtcggtacattatcttgcttctcgggaaggccctttccgtggtgtgggatcgacatctgagcatttccgtcgtccttaagcagacctatcaggaaaaagtgtgtggtttgtgcggcaacttcgatggtattcagaataacgatctgacctcgtctaatcttcaagtggaagaggacccagtggatttcggaaactcctggaaagtttcatcccagtgcgcagacacccggaaggtgccccttgatagcagcccagccacctgccacaacaacatcatgaagcagaccatggtggattcctcatgtagaattctgacctcggatgtgtttcaggattgtaataagctcgttgatcccgaaccttatcttgacgtttgcatctacgatacttgctcatgcgagtcgattggagattgtgcatgcttttgcgataccattgcagcatacgcacatgtgtgtgcgcaacatggcaaagtggtcacctggaggactgccactctctgccctcaatcgtgtgaagagagaaatctgcgcgaaaatggctacgaatgtgaatggcgatacaactcgtgcgcccctgcttgtcaggtcacctgtcaacaccctgagcctctggcatgtcccgtccagtgtgtggaagggtgtcatgcgcattgtccacctggtaagattctggatgagcttcttcaaacctgtgtggaccccgaagattgtcctgtgtgcgaggtggcaggacgccgatttgcatcgggaaagaaggtcactctgaacccatctgatcccgaacattgtcaaatctgtcattgtgatgtcgttaacctcacttgtgaagcctgtcaagaacctggtggtttggtggtgcctcctaccgatgctccagtgtcgccaactaccctctacgtggaggacatctcggaaccaccactccatgatttctactgttctcgcctcctcgacttggtgttcctcctggatggatcatctcggctgtcggaggccgaattcgaagtcctgaaagcatttgtggtggatatgatggagcggttgcgcatttcgcagaaatgggtgagggtggctgtggtcgaataccacgatggatcccatgcatacattgggcttaaggaccggaagcgcccgtccgaactgagaagaatcgcatcgcaagtgaagtacgccgggtcacaggtggcgagcactagcgaagtgcttaagtacaccctgtttcagatctttagcaagatagaccggcctgaagcatctcgcattactctcctgcttatggcctcacaagaaccacaaagaatgtcgagaaactttgtgcgatacgtgcagggccttaagaaaaagaaggtgattgtcattccagtgggtattggtcctcatgcaaacctcaagcaaattaggctgatcgaaaagcaagcaccagagaataaggccttcgtcctgtccagcgtggacgagctggaacaacagcgtgacgaaattgtctcctacctgtgcgacctggcacctgaagcgcctccgccaaccctccctcccgatatggcacaggtgacggtgggccctggactccttggggtgtcaactctgggtcctaagagaaactcgatggtgctggatgttgcatttgtcctggagggatcggacaagattggagaagctgactttaacagatccaaggaattcatggaggaggtgatccagcgaatggatgtggggcaagacagcatacatgtgaccgtgctgcaatactcgtatatggtcaccgtggaatacccattttcggaggcacaaagcaaaggagatattctgcagagagtgcgcgagattaggtaccaaggaggtaacaggactaataccggcctcgcactgaggtacctttccgaccacagcttccttgtgtcgcaaggagatagggagcaagcacctaacctggtctacatggttaccgggaaccctgcttctgatgagattaagagacttcccggcgacattcaagtggtgcctattggagtgggtccaaacgcgaatgtgcaggaacttgagcgcattggctggcctaatgcacccattctcatccaagatttcgaaacccttcctagggaggccccggatttggtccttcaaagatgttgctcgggagaaggactccaaatcccaactctctccccagcacccgactgttcccaaccgcttgatgtcattttgctgcttgacggcagctcatccttccctgccagctactttgatgaaatgaagagcttcgcgaaggcattcatatcgaaggccaacatcggtccacggctgacgcaggtgagcgtccttcagtacggttcaatcactactatcgatgtgccatggaacgtggtgcccgaaaaggcccatctcctctcgttggtcgatgtgatgcaacgggagggcggaccctcgcagatcggcgacgctttgggattcgccgtgagataccttacttcagagatgcatggagcacggccaggagcgtcgaaggccgtggtaattcttgtgactgatgtgtcggtggactccgttgatgcagcagcagatgccgcaaggtcaaatagagtgactgtgtttccaatcggaattggcgaccggtacgatgccgcgcagcttcgtatcctggcaggacctgccggagattcgaatgtggtcaaactccaacgtatagaggatctgcccaccatggtgaccctgggaaactcgtttcttcataagctctgctcgggattcgtcaggatttgtatggacgaggacggtaacgaaaaaagaccaggtgacgtgtggaccctccctgaccaatgtcacaccgtgacttgccaaccagatggacagaccttgctgaaatcccatcgcgtcaattgtgaccgcggtcttaggccatcatgtcctaattcgcaatcccctgtgaaggtggaggaaacttgcggttgcagatggacctgtccttgtgtgtgtactggtagctctacccgacatatcgtgactttcgatgggcagaactttaaacttacgggctcctgtagctacgtgctttttcaaaacaaggaacaggacttggaagtcattctgcataacggcgcatgttcaccaggagctagacaaggctgtatgaagagcatcgaagtgaaacacagcgcacttagcgtcgaacttcattcagatatggaagtcacggtcaatggtcggctcgtgagcgtgccctacgtgggtggaaacatggaagtgaatgtctacggagcaattatgcacgaagtccgctttaatcatcttggacatatcttcacctttacgccacaaaacaatgaatttcagcttcagctgtctcctaaaacttttgcatcaaagacgtacgggctgtgtggtatctgtgatgaaaacggggcaaacgactttatgctccgggatggtaccgtgaccaccgactggaaaacgctcgtccaggaatggactgtgcaaagacccggacaaacctgtcagccgattctcgaagagcaatgccttgtgccggattcctcccactgtcaggtccttctgctgcccctgtttgctgagtgccataaggtgctcgcgccagccactttctatgcgatttgtcaacaggactcatgccaccaggaacaggtctgtgaagtcatagcatcatacgcgcatctgtgtcgcaccaatggtgtgtgtgtcgattggcggacccctgatttctgtgctatgtcgtgtcctccctccctcgtgtacaaccattgcgaacatgggtgccccaggcattgtgacggaaatgtttcgtcctgtggggaccatccatccgaagggtgtttctgtccacctgacaaggtgatgctcgaaggatcctgcgttcctgaggaagcgtgcacccagtgtattggagaggacggggtgcaacatcaatttctggaagcgtgggtgcccgaccatcagccgtgtcaaatctgcacttgcctttccggtcgtaaagtgaactgtaccacccagccttgtcccaccgcaaaggcacctacttgtggactgtgtgaggttgcacgtctgaggcaaaacgccgaccagtgttgccctgagtatgaatgtgtctgtgatccagtgtcgtgtgatcttcctcctgtcccacattgtgagagaggacttcaacccaccctcacgaacccgggtgaatgtcgcccaaactttacctgtgcatgcaggaaagaagaatgtaagagagtgagccccccttcatgtccaccccacagacttcctaccctgcgcaagacccaatgctgcgacgagtatgagtgtgcatgcaattgcgtgaattcaactgtgtcctgccctctgggataccttgcttcaactgcaactaacgattgtggctgcactactaccacctgcctgcccgacaaggtttgtgtccatagatcaacgatttaccccgtgggccaattctgggaagaaggatgtgacgtgtgtacttgtacggatatggaggatgcagtcatgggtcttagagtcgcacaatgttcacagaagccttgtgaagattcatgtagatccggttttacttacgtcctgcatgagggagaatgctgtggaagatgtctcccatcagcttgtgaagtggtgactggctcacccagaggagacagccaatctagctggaagtcagttgggagtcagtgggcttcgcccgaaaacccctgtctgatcaacgaatgtgtgcgagttaaggaggaagtgtttattcaacagcggaatgtcagctgtccgcaattggaagtgccagtgtgtccatcgggcttccaactctcctgcaaaacttcggcctgttgccctagctgtcgctgtgaaagaatggaggcttgcatgctgaacggtaccgtcatcggacccggaaagaccgtgatgattgatgtgtgtacgacttgtcggtgtatggtccaggtgggggtgatttcggggtttaagttggagtgtcggaaaacgacttgtaatccatgcccactggggtacaaggaggagaacaataccggggagtgctgtggccgctgtctccctaccgcttgtaccattcagctgagaggtggtcagataatgacgctgaagcgcgatgaaactctgcaggatggatgcgacacccacttctgtaaggtgaatgagagaggcgagtacttttgggaaaagagagtaactggatgtcctccattcgacgaacataagtgtctggcggaaggtgggaagattatgaagatccctggcacctgttgtgatacctgtgaggaacctgaatgcaacgatatcacggccagactccagtacgtgaaagtcggatcgtgcaagtcggaagtggaggtcgatattcactactgccaaggaaagtgtgcctccaaggccatgtattccatcgacattaacgacgtgcaggatcagtgtagctgttgttcacctacccgcactgaaccaatgcaagtggcactccattgtaccaatggcagcgtggtgtaccacgaggtgttgaacgctatggaatgcaagtgcagccctcgaaaatgttccaaa

SEQ ID NO: 21332 - DNA, 8439 bp, synthetic construct
  misc_feature 1..8439: note = source = /note="Description of Artificial Sequence: Synthetic coding sequence"
  source 1..8439: mol_type = other DNA
atgataccggcgcgatttgcgggtgttttactagcgttagcgttaatattaccgggtacgttatgtgcggaaggtacgcgaggtcgttcgtcgacggcgcgttgttcgttatttggttcggattttgttaatacgtttgatggttcgatgtattcgtttgcgggttattgttcgtatttactagcgggtggttgtcaaaaacgatcgttttcgataataggtgattttcaaaatggtaaacgtgtatcgctatcggtatatttaggtgaattttttgatatacatctatttgtaaatggtacggttacgcaaggtgatcaacgtgtatcgatgccgtatgcgtcgaaaggtttatatttagaaacggaagcgggttattataaattatcgggtgaagcgtatggttttgttgcgcgtatagatggttcgggtaattttcaagttttattatcggatcgatattttaataaaacgtgtggtttatgtggtaattttaatatatttgcggaagatgattttatgacgcaagaaggtacgctaacgtcggatccgtatgattttgcgaattcgtgggcgttatcgtcgggtgaacaatggtgtgaacgagcgtcgccgccgtcgtcgtcgtgtaatatatcgtcgggtgaaatgcaaaaaggtctatgggaacaatgtcaattactaaaatcgacgtcggtatttgcgcgatgtcatccgttagtagatccggaaccgtttgttgcgttatgtgaaaaaacgctatgtgaatgtgcgggtggtctagaatgtgcgtgtccggcgttattagaatatgcgcgtacgtgtgcgcaagaaggtatggttctatatggttggacggatcattcggcgtgttcgccggtttgtccggcgggtatggaatatcgtcaatgtgtatcgccgtgtgcgcgaacgtgtcaatcgctacatataaatgaaatgtgtcaagaacgatgtgttgatggttgttcgtgtccggaaggtcaattattagatgaaggtctatgtgttgaatcgacggaatgtccgtgtgtacattcgggtaaacgttatccgccgggtacgtcgttatcgcgagattgtaatacgtgtatatgtcgaaattcgcaatggatatgttcgaatgaagaatgtccgggtgaatgtttagtaacgggtcaatcgcattttaaatcgtttgataatcgttattttacgttttcgggtatatgtcaatatttactagcgcgtgattgtcaagatcattcgttttcgatagttatagaaacggttcaatgtgcggatgatcgagatgcggtatgtacgcgttcggtaacggtacgtttaccgggtctacataattcgctagttaaactaaaacatggtgcgggtgtagcgatggatggtcaagatgtacaactaccgctattaaaaggtgatttacgtatacaacatacggtaacggcgtcggttcgtctatcgtatggtgaagatctacaaatggattgggatggtcgtggtcgtctattagtaaaactatcgccggtatatgcgggtaaaacgtgtggtctatgtggtaattataatggtaatcaaggtgatgattttttaacgccgtcgggtttagcggaaccgcgtgttgaagattttggtaatgcgtggaaactacatggtgattgtcaagatttacaaaaacaacattcggatccgtgtgcgttaaatccgcgtatgacgcgattttcggaagaagcgtgtgcggtattaacgtcgccgacgtttgaagcgtgtcatcgtgcggtatcgccgttaccgtatctacgtaattgtcgttatgatgtatgttcgtgttcggatggtcgagaatgtttatgtggtgcgctagcgtcgtatgcggcggcgtgtgcgggtcgtggtgttcgagtagcgtggcgagaaccgggtcgatgtgaattaaattgtccgaaaggtcaagtttatctacaatgtggtacgccgtgtaatttaacgtgtcgatcgctatcgtatccggatgaagaatgtaatgaagcgtgtttagaaggttgtttttgtccgccgggtctatatatggatgaacgtggtgattgtgtaccgaaagcgcaatgtccgtgttattatgatggtgaaatatttcaaccggaagatatattttcggatcatcatacgatgtgttattgtgaagatggttttatgcattgtacgatgtcgggtgtaccgggttcgttactaccggatgcggttctatcgtcgccgctatcgcatcgatcgaaacgttcgttatcgtgtcgaccgccgatggttaaactagtttgtccggcggataatctacgagcggaaggtttagaatgtacgaaaacgtgtcaaaattatgatctagaatgtatgtcgatgggttgtgtatcgggttgtttatgtccgccgggtatggtacgacatgaaaatcgatgtgttgcgttagaacgttgtccgtgttttcatcaaggtaaagaatatgcgccgggtgaaacggtaaaaataggttgtaatacgtgtgtttgtcaagatcgaaaatggaattgtacggatcatgtatgtgatgcgacgtgttcgacgataggtatggcgcattatttaacgtttgatggtctaaaatatttatttccgggtgaatgtcaatatgttctagtacaagattattgtggttcgaatccgggtacgtttcgtatattagtaggtaataaaggttgttcgcatccgtcggtaaaatgtaaaaaacgtgttacgatattagtagaaggtggtgaaatagaattatttgatggtgaagttaatgtaaaacgtccgatgaaagatgaaacgcattttgaagttgtagaatcgggtcgatatataatattactactaggtaaagcgttatcggttgtatgggatcgtcatctatcgatatcggttgttttaaaacaaacgtatcaagaaaaagtttgtggtttatgtggtaattttgatggtatacaaaataatgatttaacgtcgtcgaatctacaagtagaagaagatccggtagattttggtaattcgtggaaagtatcgtcgcaatgtgcggatacgcgtaaagtaccgttagattcgtcgccggcgacgtgtcataataatataatgaaacaaacgatggtagattcgtcgtgtcgtatattaacgtcggatgtatttcaagattgtaataaattagtagatccggaaccgtatctagatgtatgtatatatgatacgtgttcgtgtgaatcgataggtgattgtgcgtgtttttgtgatacgatagcggcgtatgcgcatgtttgtgcgcaacatggtaaagttgttacgtggcgtacggcgacgctatgtccgcaatcgtgtgaagaacgaaatttacgagaaaatggttatgaatgtgaatggcgttataattcgtgtgcgccggcgtgtcaagttacgtgtcaacatccggaaccgttagcgtgtccggtacaatgtgttgaaggttgtcatgcgcattgtccgccgggtaaaatactagatgaactattacaaacgtgtgtagatccggaagattgtccggtttgtgaagtagcgggtcgtcgatttgcgtcgggtaaaaaagtaacgttaaatccgtcggatccggaacattgtcaaatatgtcattgtgatgtagtaaatttaacgtgtgaagcgtgtcaagaaccgggtggtctagtagttccgccgacggatgcgccggtatcgccgacgacgttatatgttgaagatatatcggaaccgccgttacatgatttttattgttcgcgtttactagatttagtatttctactagatggttcgtcgcgtttatcggaagcggaatttgaagttctaaaagcgtttgttgtagatatgatggaacgtctacgtatatcgcaaaaatgggtacgagtagcggtagtagaatatcatgatggttcgcatgcgtatataggtttaaaagatcgtaaacgaccgtcggaactacgtcgtatagcgtcgcaagtaaaatatgcgggttcgcaagtagcgtcgacgtcggaagtattaaaatatacgttatttcaaatattttcgaaaatagatcgtccggaagcgtcgcgtataacgctactactaatggcgtcgcaagaaccgcaacgtatgtcgcgaaattttgttcgatatgtacaaggtttaaaaaaaaaaaaagttatagtaataccggtaggtataggtccgcatgcgaatctaaaacaaatacgtctaatagaaaaacaagcgccggaaaataaagcgtttgtactatcgtcggtagatgaactagaacaacaacgtgatgaaatagtatcgtatctatgtgatttagcgccggaagcgccgccgccgacgctaccgccggatatggcgcaagtaacggtaggtccgggtttattaggtgtttcgacgctaggtccgaaacgaaattcgatggttttagatgtagcgtttgttttagaaggttcggataaaataggtgaagcggattttaatcgttcgaaagaatttatggaagaagtaatacaacgtatggatgttggtcaagattcgatacatgtaacggttttacaatattcgtatatggtaacggtagaatatccgttttcggaagcgcaatcgaaaggtgatatattacaacgtgttcgtgaaatacgatatcaaggtggtaatcgaacgaatacgggtttagcgctacgttatttatcggatcattcgtttttagtttcgcaaggtgatcgtgaacaagcgccgaatttagtatatatggtaacgggtaatccggcgtcggatgaaataaaacgtctaccgggtgatatacaagttgtaccgataggtgttggtccgaatgcgaatgtacaagaactagaacgtataggttggccgaatgcgccgatattaatacaagattttgaaacgttaccgcgtgaagcgccggatctagtactacaacgttgttgttcgggtgaaggtctacaaataccgacgctatcgccggcgccggattgttcgcaaccgttagatgtaatactattactagatggttcgtcgtcgtttccggcgtcgtattttgatgaaatgaaatcgtttgcgaaagcgtttatatcgaaagcgaatataggtccgcgtttaacgcaagtatcggtattacaatatggttcgataacgacgatagatgtaccgtggaatgttgtaccggaaaaagcgcatttattatcgttagtagatgttatgcaacgtgaaggtggtccgtcgcaaataggtgatgcgctaggttttgcggtacgttatctaacgtcggaaatgcatggtgcgcgtccgggtgcgtcgaaagcggttgtaatattagttacggatgtttcggtagattcggttgatgcggcggcggatgcggcgcgttcgaatcgagtaacggtatttccgataggtataggtgatcgttatgatgcggcgcaactacgtatattagcgggtccggcgggtgattcgaatgtagtaaaattacaacgtatagaagatttaccgacgatggttacgttaggtaattcgtttttacataaattatgttcgggttttgttcgaatatgtatggatgaagatggtaatgaaaaacgaccgggtgatgtatggacgttaccggatcaatgtcatacggttacgtgtcaaccggatggtcaaacgctattaaaatcgcatcgtgtaaattgtgatcgaggtttacgaccgtcgtgtccgaattcgcaatcgccggtaaaagtagaagaaacgtgtggttgtcgttggacgtgtccgtgtgtttgtacgggttcgtcgacgcgacatatagtaacgtttgatggtcaaaattttaaactaacgggttcgtgttcgtatgttttatttcaaaataaagaacaagatctagaagtaatactacataatggtgcgtgttcgccgggtgcgcgtcaaggttgtatgaaatcgatagaagtaaaacattcggcgctatcggtagaactacattcggatatggaagtaacggttaatggtcgtttagtatcggtaccgtatgtaggtggtaatatggaagtaaatgtttatggtgcgataatgcatgaagttcgatttaatcatttaggtcatatatttacgtttacgccgcaaaataatgaatttcaactacaactatcgccgaaaacgtttgcgtcgaaaacgtatggtctatgtggtatatgtgatgaaaatggtgcgaatgattttatgctacgtgatggtacggtaacgacggattggaaaacgttagttcaagaatggacggtacaacgaccgggtcaaacgtgtcaaccgatattagaagaacaatgtctagtaccggattcgtcgcattgtcaagtattactattaccgctatttgcggaatgtcataaagtactagcgccggcgacgttttatgcgatatgtcaacaagattcgtgtcatcaagaacaagtttgtgaagtaatagcgtcgtatgcgcatctatgtcgtacgaatggtgtatgtgtagattggcgtacgccggatttttgtgcgatgtcgtgtccgccgtcgttagtttataatcattgtgaacatggttgtccgcgacattgtgatggtaatgtatcgtcgtgtggtgatcatccgtcggaaggttgtttttgtccgccggataaagtaatgttagaaggttcgtgtgtaccggaagaagcgtgtacgcaatgtataggtgaagatggtgttcaacatcaatttttagaagcgtgggttccggatcatcaaccgtgtcaaatatgtacgtgtctatcgggtcgaaaagttaattgtacgacgcaaccgtgtccgacggcgaaagcgccgacgtgtggtctatgtgaagttgcgcgattacgacaaaatgcggatcaatgttgtccggaatatgaatgtgtatgtgatccggtatcgtgtgatctaccgccggtaccgcattgtgaacgaggtttacaaccgacgctaacgaatccgggtgaatgtcgaccgaattttacgtgtgcgtgtcgtaaagaagaatgtaaacgtgtttcgccgccgtcgtgtccgccgcatcgtctaccgacgctacgtaaaacgcaatgttgtgatgaatatgaatgtgcgtgtaattgtgttaattcgacggtatcgtgtccgctaggttatttagcgtcgacggcgacgaatgattgtggttgtacgacgacgacgtgtttaccggataaagtatgtgtacatcgatcgacgatatatccggtaggtcaattttgggaagaaggttgtgatgtatgtacgtgtacggatatggaagatgcggttatgggtttacgtgttgcgcaatgttcgcaaaaaccgtgtgaagattcgtgtcgttcgggttttacgtatgttctacatgaaggtgaatgttgtggtcgatgtctaccgtcggcgtgtgaagttgttacgggttcgccgcgaggtgattcgcaatcgtcgtggaaatcggtaggttcgcaatgggcgtcgccggaaaatccgtgtttaataaatgaatgtgtacgtgtaaaagaagaagtttttatacaacaacgtaatgtatcgtgtccgcaattagaagtaccggtatgtccgtcgggttttcaattatcgtgtaaaacgtcggcgtgttgtccgtcgtgtcgttgtgaacgaatggaagcgtgtatgttaaatggtacggtaataggtccgggtaaaacggttatgatagatgtttgtacgacgtgtcgttgtatggttcaagtaggtgttatatcgggttttaaattagaatgtcgaaaaacgacgtgtaatccgtgtccgttaggttataaagaagaaaataatacgggtgaatgttgtggtcgttgtttaccgacggcgtgtacgatacaattacgaggtggtcaaataatgacgctaaaacgagatgaaacgttacaagatggttgtgatacgcatttttgtaaagtaaatgaacgaggtgaatatttttgggaaaaacgtgttacgggttgtccgccgtttgatgaacataaatgtttagcggaaggtggtaaaataatgaaaataccgggtacgtgttgtgatacgtgtgaagaaccggaatgtaatgatataacggcgcgtttacaatatgtaaaagttggttcgtgtaaatcggaagttgaagtagatatacattattgtcaaggtaaatgtgcgtcgaaagcgatgtattcgatagatataaatgatgtacaagatcaatgttcgtgttgttcgccgacgcgtacggaaccgatgcaagtagcgttacattgtacgaatggttcggtagtatatcatgaagttttaaatgcgatggaatgtaaatgttcgccgcgtaaatgttcgaaa

SEQ ID NO: 21333 - DNA, 8439 bp, synthetic construct
  misc_feature 1..8439: note = source = /note="Description of Artificial Sequence: Synthetic coding sequence"
  source 1..8439: mol_type = other DNA
atgatcccagctcggttcgcaggagtgctgcttgccctggcactcatcttgccagggacgctgtgcgcggaaggaacccgcggacgcagctcaacggccaggtgttcattgttcggatcagactttgtgaacaccttcgatgggtccatgtattcattcgccggctactgttcatacctgctcgccgggggatgccagaagagatccttttcaatcatcggcgacttccaaaatgggaaacgcgtgtcgctgtcagtgtacctcggtgaattctttgacattcatctcttcgtcaacggaaccgtgacccagggagatcaacgggtttcaatgccatacgcttccaagggcctttacctggagactgaggctggatactacaagctgagtggagaagcgtacgggttcgtcgcgcgcattgatggatcgggaaatttccaagtgctgctctcagaccgctatttcaataagacctgtggactgtgtggaaactttaacatcttcgccgaagacgatttcatgacgcaagagggaaccctcacttcagatccgtacgactttgccaactcctgggcactgagctcgggagaacaatggtgtgagcgggcaagcccgccttcgagctcgtgtaacatctcttcgggagaaatgcaaaagggcctctgggaacagtgtcaattgcttaagagcacttcggtcttcgcccgatgccatcctctcgtggatccggagccctttgtcgcgctgtgcgagaagacgttgtgtgaatgcgctggtggactggagtgtgcatgtcctgcgcttctggagtacgcccgtacttgcgctcaggaggggatggtgctctacggctggactgaccattcggcctgctcgccagtgtgtccggctggcatggaatatcgacagtgcgtcagcccgtgtgctcgcacgtgccaatcattgcacatcaacgagatgtgccaggagcggtgcgtcgacggatgctcctgtccagaaggacagctcctggatgaaggactgtgcgtggaatcaactgaatgcccatgtgtgcactcaggcaagcggtacccccctggaaccagcctctcgagagactgcaatacttgtatctgtcgcaactcgcagtggatttgttcgaatgaagaatgcccaggggagtgtcttgtcaccggacaatcgcatttcaagtccttcgataaccgctattttacgttctccggaatctgccagtacctcctggctcgcgactgtcaggatcactcattctccattgtgatcgaaaccgtgcaatgcgcggacgatcgggatgcagtgtgcaccaggtcagtgactgtgcgacttcccggcctgcataactcgctggtgaagctgaaacatggtgcgggcgtggcaatggacggacaggatgtgcagctgccactcctgaagggggaccttcgcatccaacataccgtgaccgcatccgtccgcctctcctacggcgaagacctccagatggactgggatggaagaggacgcttgttggtgaagctgtcgccggtgtacgccggcaagacttgtggattgtgcggtaactacaacggcaatcagggggatgattttctcaccccgagcgggctcgcggagccgcgggtcgaggactttggaaatgcatggaaactccacggagactgtcaagatcttcagaagcagcatagcgatccgtgcgccctgaaccctcgaatgaccaggttctccgaagaggcctgcgccgtcctgacttccccgaccttcgaagcctgtcaccgtgccgtctccccgctgccttacctgagaaattgcagatatgatgtctgttcttgctccgatggccgcgaatgcctgtgcggcgccctggctagctacgcggctgcgtgcgcgggacgcggagtgcgggtagcctggcgcgagcccggtcgatgcgagctgaactgcccgaaggggcaggtgtacctgcagtgcggaactccttgtaatctgacctgtcggtcactctcataccccgatgaggagtgcaatgaggcatgccttgaggggtgcttttgcccgccgggcctctacatggacgaacgcggagactgcgtgccaaaagcccagtgcccgtgctactacgacggtgagattttccagccagaggacatcttctcggaccaccacaccatgtgctactgtgaggatggattcatgcactgcactatgtcgggggtgccaggatcgttgctgccggatgcggtcttgtcatccccgctgtcccaccggagcaagagatcgctgtcttgtcggcctcccatggtgaagttggtctgcccagcggataacctgcgggccgaaggactcgaatgcaccaagacctgccaaaactacgacctggaatgcatgtcaatgggatgcgtcagcggctgcctgtgtccccctggaatggtgcgccatgaaaatcgctgcgtggcactcgagcggtgcccatgcttccatcagggaaaagaatacgcgccaggagaaaccgtgaaaatcggctgtaatacctgtgtgtgccaggatagaaaatggaattgcaccgaccacgtgtgcgacgcgacgtgctcgaccattggaatggcccattacctgactttcgacggactgaaataccttttccccggtgagtgccagtatgtcctcgtccaagactactgcggctcaaatccgggcaccttcaggatcctggtcggaaacaagggatgctcccacccgtccgtcaaatgcaagaagcgcgtcaccatactggtggaaggcggtgagatcgaactcttcgatggggaggtgaacgtgaagcggcctatgaaggacgaaacccacttcgaagttgtggagagcggacgttatatcatcctgctgctgggaaaggcgctgtcagtggtgtgggaccgccacctgtccatcagcgtggtcctgaagcagacttaccaggaaaaagtgtgtggactgtgcggcaacttcgacggaatccaaaacaacgatcttacttcttcgaacttgcaagtggaggaagaccctgtggactttggcaattcgtggaaggtgtccagtcaatgcgcagacactaggaaagtcccgttggacagctcgcctgcaacctgtcacaacaacatcatgaagcagaccatggtggactcgtcctgtcggatacttacctcggatgtctttcaggattgcaacaagctggtggacccagaaccatacctcgacgtgtgtatttacgacacctgctcatgtgagtcgatcggagattgtgcttgtttctgcgacactatcgcggcctacgcccacgtgtgcgctcaacacggaaaggtcgtcacttggaggactgccaccctgtgccctcaaagctgcgaggaacgtaacttgcgcgagaacggatacgaatgcgaatggcggtacaacagctgtgccccggcgtgccaggtgacctgtcagcaccctgaacctctcgcctgccccgtgcagtgcgtggaaggatgccacgcccactgcccgcccggaaaaatcctggacgaattgctccagacgtgcgtcgacccagaagattgcccggtctgtgaagtggctggaaggagattcgcctccggtaagaaggtgactctgaacccatccgacccagagcactgccagatctgccactgtgacgtcgtgaacttgacctgtgaggcctgccaggaaccggggggcttggtggttccgccgactgatgcgccggtgtcaccaactactctgtacgtggaggatatcagcgaaccaccactccatgatttttactgttcccggctgttggatctcgtctttctgcttgatgggagctcccggctctctgaagctgaatttgaggtgttgaaagcattcgtggtcgacatgatggagcgcctgcggattagccaaaaatgggtccgggtcgccgtcgtcgagtatcacgatggaagccatgcttacataggcctgaaagatcggaagcgtccatccgaactgagacggatcgcctcgcaagtgaagtacgctggctcgcaagttgcctccacgagcgaggttctcaagtacactctttttcagattttttctaaaattgatcgcccggaggcttcgagaatcaccctcctgctgatggcctcccaggagccacagcggatgagcaggaacttcgtgcgctacgtgcaggggctgaagaaaaagaaagttatcgtgatccctgtgggaatcggtccgcatgcgaaccttaagcaaatcagactcatcgaaaagcaggcgccggagaataaggcttttgtgctttcgtccgtcgacgagctggaacaacagagagatgaaatcgtgtcgtacctgtgcgacctggcgccagaagccccaccgcctactctgcctccggacatggcacaggttactgtgggaccaggactgctgggagtgagcaccctcggaccgaagaggaattccatggtgttggacgtcgccttcgtgctggaaggttcggacaagatcggagaagctgacttcaatagatcaaaggagttcatggaggaggtcatccagcgcatggacgtgggacaagactccatccatgtgaccgtgctgcagtactcctatatggtgacggtggaataccccttctcagaggcacagtcaaagggagacattctgcagcgggtgcgcgagatccgataccagggaggcaaccgcactaatactgggctggcactccggtacctcagcgaccactcgttcctggtgtcacagggcgatcgggagcaggcgccaaacctcgtttacatggtcaccggcaacccggccagcgatgagattaagagactgcccggtgacatccaagtcgtgccaatcggagtcggaccgaacgctaacgtccaggaattggaacgcataggatggccaaacgctccaatcttgatccaggattttgaaactctcccacgagaagcacctgacctcgtgctccagcgctgctgcagcggagagggactccagattccgaccctgagcccggcccctgactgctctcagcctctcgacgtcatcttgctgctcgatggctcatccagttttccagcgtcctactttgatgaaatgaaatccttcgcaaaggcctttatctcgaaggccaatattggtccgagactgacccaggtgtccgtgctccagtatggatcgatcaccaccatcgatgtgccttggaatgtggttcctgagaaggctcatctcctgagtctggtcgacgtgatgcagcgcgagggtggaccgtcacaaatcggagacgcgcttggtttcgctgtccgctacttgacttcagaaatgcacggtgcacgcccgggcgcatcgaaggcggtcgttattctggtgaccgacgtttcagtggactcggtcgatgctgccgccgatgcggcgagaagcaatcgcgtgactgtgttcccgatcggaatcggggatagatacgacgccgctcagctgagaatcctcgctggacctgccggcgattcaaacgtcgtgaagctgcaacgaatcgaagacctgccgactatggtcactctgggaaactccttcctgcacaagctgtgctcaggtttcgtgcgcatctgcatggatgaagacggaaatgaaaagcggccgggcgatgtgtggaccctgccggatcagtgtcacactgtcacgtgccagcctgacggtcaaactttgctcaaatcgcatcgggtaaattgcgatcggggtctgcggccgtcctgcccgaactcccagagcccggtgaaagtggaagaaacctgcggctgccgctggacgtgtccgtgcgtttgcactggctcatctactcggcacatcgtgaccttcgatggtcaaaatttcaagctcactggaagctgctcgtacgtgctgttccagaacaaagaacaggacctggaagtgatcctccacaacggtgcttgctcacctggtgcccgccagggctgcatgaagtcgatcgaggtcaaacatagtgcactctcagtcgaactgcattctgatatggaagtgaccgtcaacggacggctggtgtccgtgccatacgtgggaggcaacatggaggtgaatgtgtacggggctatcatgcacgaagtcaggttcaatcaccttggacatattttcacgttcactcctcagaacaatgaattccagctgcagctctcgcctaagacttttgcgtcgaaaacttacggcctctgcggaatctgcgatgaaaacggagcgaacgactttatgcttcgggacggtactgtgaccactgactggaagacgctggtccaggaatggaccgtccagcgcccggggcagacctgccaacccatccttgaagagcaatgtctggtgccagactcttcacactgccaagtcctcctgctcccgctcttcgccgagtgccataaggtcttggcgccggctactttctacgctatctgccagcaggattcgtgtcaccaggagcaagtgtgcgaggtgatcgcctcatacgctcatctgtgccgcaccaacggagtgtgcgtggactggcggactcctgacttctgcgcgatgagctgccctccgtctcttgtttacaatcactgcgaacacgggtgcccgagacattgcgacggcaatgtgtcatcgtgcggcgatcacccgtcagaggggtgtttctgccctccagataaggttatgctcgaaggctcatgcgtcccagaggaagcctgcactcaatgcatcggcgaggacggagtgcaacaccagttcttggaagcctgggtcccggaccaccaaccgtgccaaatctgcacgtgtctcagcggacgcaaggtcaactgcactacccagccgtgcccgactgccaaagcccctacctgcgggctgtgcgaggttgcaagactgaggcaaaacgcggatcagtgctgcccggaatacgaatgtgtgtgtgatcccgtgagctgcgacctgccgcctgtcccgcactgcgagcgcggtctgcaaccgactttgaccaatccgggtgagtgtcgacctaatttcacctgcgcgtgcaggaaagaagaatgtaaaagggtgtcgccgccatcgtgcccaccacacaggctgccgactctgcggaagacccaatgctgcgacgaatacgagtgcgcctgtaactgcgtgaactccacggtttcgtgccctctgggatacttggcgagcactgcaaccaacgattgcggatgcaccactactacttgcctgccggacaaggtgtgcgtgcacagatcaactatctatcctgtgggccaattttgggaggaaggatgcgatgtgtgcacctgtactgacatggaggatgcagtgatgggactgcgggtcgctcagtgctctcaaaagccgtgtgaggactcctgcaggtcggggttcacctacgtgcttcatgagggggaatgttgcggcaggtgtttgccatcagcttgcgaagtggtcacgggctcgccgcggggtgacagccaatcatcttggaagtccgtcggttcccagtgggcctcccctgaaaatccatgtctcatcaatgaatgtgtccgggtcaaggaagaagtgtttatccagcagagaaacgtgtcctgtccccaacttgaggtcccggtttgcccaagcggattccaactctcgtgcaaaaccagcgcctgctgcccatcctgtcgctgcgagagaatggaggcctgtatgctgaatggtactgtgattggtccaggaaaaaccgtgatgatagacgtgtgcaccacgtgtcggtgcatggtacaggtcggtgtgatctcggggttcaaacttgagtgccgcaagaccacctgcaacccctgcccgctgggatacaaagaagagaataataccggggagtgctgcggcagatgcttgccaacggcgtgcaccatccagctgcgcggcggccaaatcatgacgctgaagcgggacgagactttgcaggacggatgcgacactcacttctgcaaggtgaacgaacggggtgagtacttctgggaaaagagggtcactggatgtccgcccttcgacgaacataagtgcttggctgaaggcggaaagataatgaaaattcctggcacctgctgcgacacttgcgaagaaccggagtgcaacgacatcactgctcggctccagtacgtgaaggtcggaagctgtaaatctgaagtcgaagtggacatccattactgccaaggcaagtgcgcttccaaggccatgtactccatcgacatcaacgacgtgcaagatcagtgctcatgctgtagccctactcggactgaacctatgcaggtggcactgcattgcactaacggatcggtggtttaccatgaagttctgaacgccatggagtgcaaatgcagcccgaggaagtgctctaag

SEQ ID NO: 21334 - DNA, 8439 bp, synthetic construct
  misc_feature 1..8439: note = source = /note="Description of Artificial Sequence: Synthetic coding sequence"
  source 1..8439: mol_type = other DNA
atgatcccggccaggttcgcgggggtgctgctggctctggccctcattctgcctggaaccctctgcgctgaaggcacccgaggcagatcatctacggctagatgttctcttttcggcagcgatttcgttaatacattcgatgggtccatgtactcttttgctggatattgttcgtacctgctagccgggggctgccagaagcgcagtttttccatcataggcgatttccagaatggaaaaagagtctcactctcagtatatctaggggagttctttgatatccacctattcgtcaacggcacagtcacccaaggtgaccagagggttagtatgccctacgcatcaaagggtctgtaccttgagacagaggccggatactacaaattgtctggggaggcgtatggcttcgtggcacggattgacggaagcggaaatttccaggtgctcttgagcgaccggtattttaataagacgtgcggactgtgcggaaacttcaacatttttgcagaagatgactttatgacacaggagggcacgttaacgtcagatccgtacgacttcgctaactcctgggcgctgtccagcggggaacaatggtgtgagcgggccagccccccaagctcttcctgcaacatttcaagtggagagatgcagaaaggcctctgggagcagtgccagctcttgaagtcaacatctgtctttgcccggtgccacccattagtggaccccgagccgttcgtggctctctgtgaaaagacattatgtgagtgtgcaggtggtctcgagtgcgcctgtccagccctcttggaatacgcgagaacatgcgcacaggaaggtatggttctctacggctggacagatcacagtgcctgtagccccgtgtgccctgctggaatggagtaccgacagtgcgtctcgccctgtgccaggacgtgtcagtccctgcatataaatgaaatgtgccaagaacggtgtgtcgatggctgctcatgccctgagggccagctgttagatgagggattgtgcgtcgaaagcacagagtgtccctgtgtgcacagtggcaagagatatccaccaggaacctccctttctagagattgtaacacttgcatttgccggaatagccagtggatatgttctaacgaggaatgccccggggagtgccttgtgactggacagagccatttcaaatcctttgataatcggtacttcacgttctccggaatatgtcagtacttactggcgagagactgccaggatcatagcttttcgattgtcatagaaaccgtgcagtgtgcagatgatagggacgcggtttgtactaggagtgtaactgttcgtctgcctggattacacaactccctggttaagctgaaacacggggccggagttgccatggatgggcaggatgtgcagttaccactccttaagggggacctgcggattcagcacacggtgacggcaagcgtacgcttgagttacggtgaagatctccaaatggactgggatggcaggggcagacttctggtcaaattatccccagtgtacgcaggcaagacatgtggactatgcggcaattacaatggaaatcagggcgatgactttctgacgccctccggactggctgagcctcgagttgaggactttggcaatgcttggaagctgcacggtgactgccaggatttgcagaagcagcatagtgacccatgcgctcttaacccccggatgacacgcttttccgaggaagcgtgtgcggtgctgacgtcacccacatttgaggcttgccaccgggcagtgagcccattgccctatctgcgtaactgcaggtacgatgtttgctcctgcagcgacgggcgcgagtgcctttgtggcgctctcgcctcctacgccgctgcatgtgctggccgtggagtgagggtggcttggagagagccaggccgctgtgagttaaactgcccgaaaggacaggtttatcttcagtgtggaaccccatgtaacctgacttgtcgatcactgtcctacccggatgaggagtgcaacgaggcttgtctggagggatgtttctgtcctccaggactgtacatggacgaacggggcgactgcgttcccaaagcacagtgcccatgttactacgacggcgagattttccagccggaggatatctttagcgatcatcacaccatgtgttactgcgaggacggatttatgcactgcacaatgtccggggtgcctggttccttgcttccggacgcagtgctttcatctccactctcccatcggtctaaacgatccctctcctgccgtccacctatggtgaagctagtgtgcccagctgacaatttaagggccgaaggcttggaatgtaccaagacgtgccagaactacgatctggaatgtatgtctatgggctgcgtgtccggctgtctgtgtcctccaggcatggtgcggcacgagaaccggtgcgtggcattagaacgctgcccctgtttccaccagggcaaggagtatgctcccggcgaaaccgtcaagattggttgcaatacctgtgtctgtcaagaccgcaaatggaattgcaccgaccacgtatgtgatgccacctgttctaccatcggtatggcccactacctcactttcgatggcctgaaatatttgtttcctggggaatgccagtacgtgctggtgcaggattattgtggatcaaatccaggtacctttcgaatcctggtagggaataagggctgcagccaccccagcgttaaatgcaagaaaagggtgacgatcttagtcgagggcggggaaatcgagctctttgacggcgaagtcaacgtgaaacgacccatgaaggatgagacacacttcgaagtggtcgaaagtggaagatacatcatcttgctgctgggcaaagcactgagcgtggtttgggaccgccacctgtcaataagtgtggttctcaaacagacataccaggaaaaagtttgtggtctgtgtggcaattttgatgggattcagaacaacgatttgactagctctaacctgcaagtggaggaagatcccgttgactttggcaactcctggaaagtgagtagtcagtgtgcggatacccgtaaagtgcccctggactccagccccgcaacctgccataataacatcatgaagcagacaatggtggatagctcgtgtcgtatcctcacgagcgacgtgtttcaggattgcaataaactggttgatcccgagccatacctggatgtctgcatatacgacacatgctcttgtgagtcgatcggagattgcgcctgtttttgtgatactattgcggcttatgctcacgtctgcgcgcagcatggcaaagttgtcacttggcggacagccacgctgtgcccccagagctgcgaggaaaggaacctcagagagaatgggtacgaatgtgagtggaggtacaactcatgtgccccagcctgccaggtgacatgtcagcatcctgagcccctcgcttgccctgtgcagtgtgtcgaggggtgtcatgcccattgtccgcccggcaagattctcgatgagctgctccagacttgcgtcgatcctgaggactgccccgtgtgtgaggtagcaggaaggcggtttgctagcggtaagaaagtaaccttgaacccttcagaccctgaacactgccagatctgtcactgtgatgttgtcaacctgacttgtgaagcttgccaagagcctgggggcctcgtggttcctccaacagacgcccccgtatctccgacaactctgtacgtcgaagatattagtgaaccccccctgcacgatttctattgttcacgccttttggatctggtgtttttgttggacgggagtagccgattgtctgaagccgagtttgaagtcttgaaggcgtttgtggtggacatgatggagaggttgagaatcagccaaaagtgggttagagtcgccgtagtggagtatcatgatggctctcacgcctatattgggctcaaggacagaaaacgccccagcgagcttcgacgcatcgcctcacaggtgaaatacgcaggatcccaggtcgcgagcacttccgaggtgctcaaatatactttattccagattttctcaaaaatcgatcgccccgaagcttcccggatcacactgctgctcatggccagccaggagcctcaaaggatgtctcggaactttgtgaggtacgtgcaaggactgaaaaagaaaaaggttattgtgatccctgtcgggattggaccccacgcgaatcttaagcagattcggttgatcgagaagcaagcaccggagaacaaggcctttgtcctttcttcagtggacgagctggaacaacagcgcgacgagatagtgtcttacctgtgcgacttggcacccgaggcaccgccccctactttgcctccagacatggcccaggtgacggttggccccggtctgttgggcgtttcaactctcgggccaaaacgcaattcaatggtcctggatgtagcttttgtactcgagggctccgacaagatcggggaggctgatttcaacaggtcaaaagagttcatggaagaggttatccagcggatggatgttggacaggacagtatacacgtcaccgtgttgcaatattcatatatggtcacggtggagtaccccttctcggaagcccagagtaaaggggatatactgcagcgcgtacgggaaatccgctatcagggcggcaatcggactaataccggcttagcgctgagatacctgtcagatcacagcttccttgtgagccagggcgaccgggagcaggcgccaaacctcgtgtacatggtgacaggaaacccggcctctgacgagattaaacgcctgcctggtgatatccaggtggtacctataggagtgggcccaaacgccaacgtccaggagttagagcggatcggctggccgaacgcacccatattaatccaagacttcgaaactctacctcgcgaggcccccgatcttgtgttgcagcgctgctgtagcggggagggtttacagattcccaccctgagccctgccccagattgctcacaaccactggatgtcatcttgctcttagacggctcatcaagcttcccagcatcttatttcgacgagatgaaatccttcgccaaagcctttatcagcaaggcgaatatcggcccacgccttacccaggtgagcgtcctgcaatatgggagtataactaccatcgacgtgccctggaacgtggttccggaaaaggctcatctgctgtctcttgtcgatgtgatgcagagagagggtgggcccagtcagattggcgacgctctaggttttgctgtcagatacctgacgtccgagatgcatggggcccgacccggtgcctccaaagcagtggtgattctggtgaccgatgtgtccgtcgattcagtggacgccgcggccgatgctgctaggagcaaccgagtgacagtatttccgattgggataggagatcgttatgatgctgcccaattgaggatcctggctggcccagcaggggacagcaacgtcgtgaagctccagcgtatagaagatctcccaacaatggtgacgctggggaattcgttcttgcacaagctttgttcaggctttgttagaatttgcatggatgaagatggcaacgaaaaaaggccaggggatgtgtggacactccctgaccaatgtcacactgtgacgtgccagcccgacggccagaccctgttaaaatcgcaccgcgtgaattgcgataggggattgagacccagttgtcccaactcgcagagtccagttaaagtcgaggagacctgtggttgtagatggacctgcccctgcgtgtgtaccggctccagtaccaggcatatagtcacattcgacgggcagaatttcaaacttacaggaagctgttcatatgtactgttccagaacaaagaacaggatctggaagtgattcttcacaatggggcttgctcgcccggcgctagacaaggttgcatgaaaagtatagaagtgaagcacagcgccttgtccgttgaactgcacagcgatatggaagtgactgtcaacggaaggctggtctcggttccctacgtggggggtaatatggaagtaaacgtgtatggagcaatcatgcatgaggtaaggttcaatcacctgggtcatatatttacctttactccacagaataacgaattccagctacagttgagtcctaaaacgttcgcctcaaaaacatatggattatgtggaatctgcgacgagaacggtgccaacgactttatgctgcgcgatgggacagtgaccaccgactggaagactttagtccaggagtggaccgtgcagcggcccggacagacatgccaaccaatcctcgaagagcagtgcttagtgcccgattcatcccactgccaagtgctccttctccccttgttcgcagagtgtcataaggtcctggcccctgctacattctatgcaatctgccagcaagactcctgtcaccaagagcaggtgtgcgaggtgatagcttcttacgctcatctgtgcagaaccaacggcgtgtgtgtcgattggcgtactccagacttctgtgctatgagttgccccccaagtttggtgtataaccactgtgaacacggttgcccccgtcactgcgacgggaatgttagtagctgtggtgaccatccctcagagggctgcttttgtcccccagataaagtgatgttggagggcagctgtgttcctgaggaggcctgcacacagtgcattggcgaggatggcgtacagcatcagtttctcgaagcctgggtgcctgaccatcagccatgtcagatctgtacttgtttatctgggagaaaagtgaactgcactacacaaccttgccccaccgccaaagcccccacttgtggcctgtgcgaggtggccaggctgagacagaacgcggaccagtgctgtccggaatacgagtgcgtgtgcgacccagtgagctgcgacctaccaccagtgccccactgtgagcgggggttgcaaccaaccctgacaaaccccggggaatgcagaccaaacttcacatgcgcttgccgcaaggaggagtgtaaacgcgtcagccctcccagttgcccccctcatagactgcccaccctcaggaagacacagtgttgcgacgaatatgaatgcgcctgcaactgcgtgaatagtacggtgtcttgccctcttggatatctggcaagtaccgcgactaacgactgcgggtgcactaccacaacgtgtctgcctgacaaggtgtgtgtacaccgctctactatctatcccgtgggtcagttctgggaggagggatgtgacgtctgtacatgtacggatatggaagatgccgttatgggacttagggtggcgcagtgctctcagaagccttgcgaagactcctgtaggtcaggctttacatacgttctgcatgaaggcgaatgttgtgggcgctgtctgccaagcgcttgcgaagtggttaccggctctcccagaggcgacagccagagctcctggaaaagcgttggcagccagtgggctagccccgagaacccctgcctgattaacgagtgtgtgcgggtgaaggaggaagttttcatccagcaacgaaatgtgagctgcccacagttggaggtgcccgtgtgtcctagtggcttccagctgtcctgtaaaacttcagcgtgctgtccatcctgccggtgcgaacgcatggaggcgtgcatgctgaacggcactgtaatcgggccagggaagaccgtcatgattgatgtctgtaccacgtgtaggtgtatggtccaagtaggagtaatttcgggtttcaagctcgaatgcagaaagaccacatgtaacccttgcccacttggttacaaggaagaaaataacaccggggaatgctgcgggcgatgtctacccacagcatgcacaatacagctgcgcggaggacagatcatgacgcttaagagagatgagacactgcaggacggctgtgatacccacttttgcaaggtgaacgagaggggggagtacttctgggagaaacgggtgactgggtgccctccctttgacgaacataaatgccttgccgagggaggaaagatcatgaagatccccggaacatgttgtgacacttgtgaggagccagaatgtaatgacattacagcacggttacaatatgtaaaagtcgggagctgcaagagtgaagtggaagtggacatccattattgccagggcaagtgcgcctctaaagctatgtattccatcgatataaatgatgtgcaggaccagtgttcttgctgttctcctacgagaacggaacccatgcaggtggcgttgcactgcaccaatggatcagtggtttatcatgaggtgcttaacgcaatggagtgcaagtgttcgcctcgcaaatgtagtaag

SEQ ID NO: 21335 - DNA, 8439 bp, synthetic construct
  misc_feature 1..8439: note = source = /note="Description of Artificial Sequence: Synthetic coding sequence"
  source 1..8439: mol_type = other DNA
atgattcccgccagattcgccggagtgctgttggcacttgcactgatcttgccgggcacgctctgtgctgaaggtaccagaggacgctcctccaccgctcggtgctcgctgttcgggtcagactttgtgaacacttttgacggatcaatgtactcgtttgctggatactgctcatacctcctggccgggggatgtcaaaagcggtcattctcgatcatcggagattttcaaaacggaaagagagtcagcctcagcgtgtacctgggagagttctttgacatccatctgttcgtgaatggaaccgtcactcagggcgaccagagagtgagcatgccttacgccagcaaaggattgtacctcgaaaccgaggcaggctactacaaacttagcggtgaagcctacggattcgtggctcggatcgatggcagcggtaactttcaagtcctgctgtcggatcggtatttcaacaagacttgcggcctgtgcggaaacttcaacatcttcgcggaagatgacttcatgacccaggagggcactctgacttccgacccatacgatttcgccaactcgtgggccctgtcatcaggcgaacaatggtgtgaaagggcgtcacccccatcgtcatcatgcaacatcagctctggtgaaatgcagaagggcctgtgggagcagtgccagctcttgaagtcgacctccgtgtttgcaagatgtcacccgctggtagatccagaaccgttcgtggctctgtgcgaaaagaccctctgtgaatgcgcaggcggccttgagtgcgcttgcccggccctgctcgagtacgctcggacttgcgcacaagagggaatggtgctgtacggatggactgaccattcagcctgctccccggtgtgtcctgcaggaatggaatacagacagtgtgtctcaccgtgcgccagaacgtgccagtcgctccacatcaatgagatgtgccaagaacgctgcgtggatggctgctcatgcccagagggccagctcctcgacgaggggctgtgcgttgagtccaccgagtgcccgtgtgtgcattccggcaagagatacccgcctgggaccagcctcagcagggattgcaacacgtgtatttgccgcaactcacagtggatctgctcgaacgaagaatgcccgggagagtgcctggtcacgggacagagccatttcaaatcattcgacaacaggtatttcacgttctcaggaatctgccagtacttgctggccagggattgccaggaccattcctttagcatcgtgatcgaaaccgtgcagtgcgctgatgaccgggacgcggtgtgtactagatcagtcaccgtgaggctgccaggactccataactccctcgtgaagttgaagcatggcgcgggcgtggcaatggatgggcaggacgtgcagctccctctcctgaaaggagatctgcgcattcagcatacggttaccgcgagcgtccgcctgtcctacggcgaggacctgcaaatggactgggatggacgcggaaggctgctcgtcaaactgtcgccagtctacgccggaaagacctgcggactgtgcgggaactacaacggaaatcaaggcgacgatttcctgacgccttcaggattggccgaaccgcgagtggaagattttgggaacgcgtggaagctccacggagattgccaggatctgcaaaagcagcattccgatccgtgcgcactcaatccccgcatgaccagattctccgaggaagcatgtgccgtgcttacgtcaccgacctttgaggcttgtcatagagccgtctcaccgctgccttacctgcggaattgccgctacgacgtgtgctcctgttctgacggacgtgaatgcctgtgtggcgcgctggcctcctacgccgctgcttgtgctggccggggagtgagagtggcgtggcgggaacccggccgatgcgaactgaactgcccgaagggccaggtctacctccagtgtggaactccttgtaatcttacttgcagatcactgtcgtacccggatgaggagtgtaatgaggcgtgcctggagggttgcttttgccctccaggactctatatggacgagcgcggtgactgcgtgccaaaggcgcagtgcccatgctactacgatggggagattttccagccggaagatatctttagcgatcatcacactatgtgctactgcgaagatggcttcatgcactgcaccatgtcaggagtgccagggagccttctccccgacgccgtgctttcatcgccgctctcacaccggtcgaaacgcagcctctcatgccggccgccgatggtgaaacttgtgtgcccagccgacaacttgcgcgcggagggcctggaatgcaccaagacttgccagaattacgacctggaatgcatgtcaatgggatgcgtgagcggatgcctgtgtcccccggggatggtccggcacgaaaatcggtgcgtggcactcgaacgctgtccatgctttcaccaggggaaggaatacgcgccgggtgaaaccgtcaagatcggttgtaatacttgcgtgtgccaggatagaaagtggaattgcaccgaccacgtgtgcgacgccacgtgcagcaccatcggcatggcccactacctgacttttgacggccttaagtatctctttccgggagaatgccagtacgtgctggtgcaggattattgcggttcaaacccaggaaccttcagaatccttgtgggaaacaagggatgctcccatccatccgtcaaatgtaagaaaagagtgaccatcctcgtggagggaggcgaaatcgaactgttcgacggagaggtgaacgtcaagcgccccatgaaagacgaaactcacttcgaggtggtggaatccggaaggtatatcatcctcctcctgggaaaagcactctccgtggtgtgggaccggcacctctcaatctccgtcgtgcttaagcagacctaccaggaaaaggtgtgcgggttgtgtggcaatttcgacggcatccagaacaacgacctcacctctagcaatctgcaggtggaggaggacccagtcgacttcggtaactcatggaaagtgtcaagccagtgcgcggacacgaggaaagtgcctctggacagctcccccgccacctgccataacaatatcatgaagcaaaccatggtcgactcatcgtgccgcattcttacctccgatgtgttccaggattgcaacaagctggtggatccagagccttaccttgacgtgtgcatctacgacacctgcagctgcgaatcgatcggagattgcgcttgcttctgtgacactatcgcagcctacgctcatgtgtgcgcccagcatggaaaggtggtgacctggcgcaccgccaccctgtgccctcagtcatgcgaggagcgcaatcttcgcgaaaacggatatgaatgtgaatggcgatacaacagctgcgctccagcttgccaagtgacctgccaacatccagagccgctggcatgtcctgtccagtgtgtggaaggatgtcacgcccactgcccaccgggaaagattcttgacgagctccttcaaacttgcgtggatcccgaggactgtcctgtgtgcgaagttgccgggcgcagattcgcctccggtaagaaagtgaccctgaacccaagcgacccggagcactgccagatttgtcactgcgacgtcgttaacctcacctgcgaagcctgccaagaacctggcggactcgtggtgccgccaaccgacgcgcctgtcagcccgaccactctgtatgtcgaagatatctcggagccacctctgcacgacttctactgctcgagactcttggatctggtgttcctgctcgacggatcgtcgaggctctcggaggcggaattcgaggtgctgaaggcttttgtggtggatatgatggagcgcctccgcataagccaaaagtgggtccgcgtcgcagtcgtggaataccacgatggctcccatgcttacatcggactgaaagaccgcaagcgcccgtccgagctgcggagaatcgcttcacaggtgaagtacgcgggttcccaagtggcatccactagcgaagtcttgaagtacaccctctttcagatcttctcaaagatcgacaggccagaggcgtcgcgcatcaccctgctgctgatggcgtcgcaagaacctcagagaatgtcccggaacttcgtccggtacgtgcagggcttgaaaaagaagaaggttatcgtgattccagtcggtatcggcccacacgctaatctcaagcagatccgcctcatcgagaaacaagccccagagaataaggcctttgtcctctccagcgtcgacgagttggagcaacagcgcgatgagatcgtctcctatctgtgtgatttggcacccgaggccccaccgccaactctgccaccagatatggcgcaggtgactgtgggcccgggtctgctgggtgtgtcgacgcttgggccgaaaaggaactcaatggtgctggacgtggccttcgtgcttgagggatcagacaaaattggagaggcagatttcaaccgcagcaaggaattcatggaagaagtgatccagaggatggacgtgggtcaggactcaattcacgtgaccgtacttcaatactcgtacatggtcacggtggaataccccttctccgaagctcaaagcaaaggtgatatcctgcagcgcgtgcgggaaatccggtaccagggcggaaatcgcaccaataccggactggcactccggtacctgtccgaccactcgtttctggtgtcacaaggcgaccgggaacaagcccctaatctggtgtacatggtgactgggaacccagccagcgatgagatcaagaggctgcctggagatatccaagtggtgccaatcggagtgggccctaatgccaacgtccaggagctcgaacggatcggatggccgaatgccccgatcctgatccaggacttcgaaacgctccctcgagaggcaccagacttggtgctgcaacggtgctgctccggggaaggactccagatcccaactctctcgccagcaccggattgttcgcaaccgctggatgtgatcctgctgctggacggatcctcctcattccctgcctcgtacttcgatgaaatgaagagttttgccaaagcatttatctccaaagcgaatatcggaccgcggttgacgcaggtgtccgtgctccaatatggatcgattaccacgatcgatgtgccttggaacgtggtgcctgaaaaggcccaccttctgagcctggtcgacgtcatgcagagggagggaggaccatcccagatcggagacgcgctggggttcgccgtccgctacctgacttcagagatgcacggagcccgccccggagcctccaaagccgtggtgatcctggtcaccgacgtgagcgtggattcggtggatgcggcggccgatgctgctcggtcgaacagggtcactgtctttccgatcgggataggagacaggtacgacgccgctcagcttcggatcctggcgggtccggcgggggactcaaatgtcgtgaagctgcagcgcatcgaagatctcccgaccatggtgactctcggtaattcgttcctgcataagttgtgtagcggtttcgtgaggatctgcatggacgaggacgggaacgagaagcggccaggagacgtgtggactttgccagaccagtgccacactgtcacctgccaacccgatggacagactttgctcaagtcacatagagtgaactgcgaccgcggactccgcccttcctgccccaactcgcagtcgccggtcaaggtcgaagaaacctgcggatgtagatggacctgcccctgtgtctgcactggatcgtctaccagacacatcgtcaccttcgacggacagaacttcaagctcaccggcagctgtagctacgtgctgttccagaataaggagcaggaccttgaggtgattctccacaacggcgcttgcagcccgggagcaagacagggatgcatgaagtcaatcgaggtgaaacattccgccctgtctgttgaattgcattccgacatggaagtgactgtgaatggtaggctcgtgtcagtcccttacgttggcggtaatatggaagtgaacgtctacggagctatcatgcacgaggtccggttcaatcacttgggccacatctttaccttcactcctcagaacaacgagtttcagctgcaactgtctccaaaaacgttcgccagcaagacctatggactgtgtggcatctgtgatgaaaacggcgccaacgactttatgctgcgggacggcaccgtgactactgactggaaaactctggtccaagaatggaccgtccaaagaccggggcaaacctgtcagccgattctggaggagcagtgcctggtgccggacagctcgcactgtcaagttctgctgctccctctgttcgctgagtgccacaaagtccttgccccagctaccttctacgcgatctgccagcaagacagctgccaccaagaacaagtgtgcgaagtgatcgctagctacgcacacctgtgccgcacgaacggggtgtgtgtggactggcggaccccggatttctgcgctatgtcgtgcccaccgtcgctggtctacaaccactgcgagcatggctgcccgcgccattgcgacggaaacgtgagctcgtgcggagatcatcctagcgaaggctgcttctgcccgcccgataaagtgatgctggaaggatcatgcgttccggaggaggcatgcactcagtgtatcggtgaggatggggtccagcaccagttcctggaggcttgggtaccggaccatcagccttgccaaatctgcacctgtctgtcaggacgcaaggtgaattgcaccacccaaccgtgtccgactgcgaaggcaccgacttgcggactgtgtgaagtggctcgcttgagacagaatgccgatcagtgctgcccagaatatgaatgcgtgtgcgacccggtgtcctgtgacctgccaccggtccctcattgcgaaaggggactgcaaccgactcttactaaccccggcgaatgccgcccgaatttcacttgcgcctgtcgcaaggaagaatgcaagcgggtcagccctccgtcctgcccgccgcacagactcccgaccctccgcaagacgcagtgttgcgatgaatacgaatgcgcatgtaattgcgtgaatagcactgtgagctgcccactgggataccttgcgagcactgcgactaatgattgcggttgcactaccacgacctgcctgccagacaaggtttgcgtccacagatccactatttaccctgtgggacaattttgggaagagggctgcgacgtgtgcacttgtacggatatggaggatgccgtcatgggtctgcgggtggcacagtgctcgcagaagccttgcgaggactcatgtagatcaggcttcacctacgtgctccacgaaggtgaatgctgcgggcggtgcctcccaagcgcatgcgaagtcgtgactggcagcccaaggggagactcacagtcatcatggaagtcggtgggtagccagtgggcatcaccggagaatccttgcctgattaatgaatgcgtccgcgtcaaagaggaggtgtttatccagcagcgcaatgtgtcctgcccacagctggaggtgccagtgtgtccgtcaggcttccagcttagctgtaagacttccgcgtgctgcccgtcatgccgctgcgagcgcatggaggcttgcatgctgaatggaactgtgatcgggccgggaaagactgtgatgatcgatgtgtgcacgacctgcagatgcatggtccaggtgggcgtgatttcgggattcaaactggaatgtagaaagaccacttgcaacccatgcccactgggctacaaggaggaaaacaataccggagagtgctgcggtcgctgcctcccaactgcttgtaccatccagctcagaggaggacagatcatgaccctgaagcgggatgaaaccttgcaggatgggtgtgacacccacttctgcaaggtgaacgaacggggagagtacttttgggaaaaacgagtgactggctgccccccttttgacgaacataaatgcctcgccgaaggcgggaagatcatgaagatccccggcacctgttgtgatacttgcgaggaaccggagtgtaacgacattacggcccgcctgcagtacgtgaaagtggggtcatgcaagtcagaagtcgaagtcgacatccattactgccagggcaaatgtgcttccaaggccatgtactccatcgatatcaacgatgtgcaggaccaatgctcgtgttgcagtccgacccgcactgagccgatgcaagtggcgctccactgcactaatggttcggtggtttaccacgaagtgttgaatgctatggagtgcaaatgtagcccccgcaagtgcagcaag

SEQ ID NO: 21336 - DNA, 8439 bp, synthetic construct
  misc_feature 1..8439: note = source = /note="Description of Artificial Sequence: Synthetic coding sequence"
  source 1..8439: mol_type = other DNA
atgatcccggcaaggttcgctggtgtgctgctcgcactggccttgatcctccctggaaccttgtgcgcggaaggcactcgcggacgttcctcaactgcgcggtgctccctgtttggatccgacttcgtgaacaccttcgacggcagcatgtacagcttcgcgggatactgctcgtacctgctggcgggaggatgtcagaagaggtcattctcaatcatcggcgatttccagaacggaaagcgcgtgagtctgtcagtgtacctgggagagttctttgacatccatctgttcgtgaacggcactgtaacccaaggagatcagcgcgtctccatgccgtacgcttccaagggcctgtacctcgaaaccgaagccggctactacaagctgtccggcgaggcctacgggttcgtcgctaggattgatggctccggaaacttccaggtgcttctgtccgacagatacttcaataagacctgcggactctgtggcaacttcaatatcttcgccgaggacgattttatgactcaggagggaaccctgacctcagacccatacgacttcgccaacagctgggccctttcttcgggagagcaatggtgcgaaagagcttccccgccctcatcgtcgtgcaatattagttcgggggagatgcaaaaaggactgtgggaacaatgccaactgcttaagtcgacctcagtgttcgcacggtgccatccgctggtcgatccggaaccatttgtcgcactgtgcgaaaagactctgtgtgagtgcgcaggaggactggaatgtgcgtgcccggctctgctcgaatatgcccgaacctgcgcccaagaaggaatggtgctttacggatggaccgaccattccgcttgctcgccagtttgcccagcagggatggaataccgccaatgcgtgagcccttgcgccagaacctgtcaatccctgcatatcaatgaaatgtgccaggagcggtgcgtggacggatgctcctgcccagaaggccagctcctggacgagggcctgtgtgttgaatcgactgagtgcccatgcgttcactccggcaagagatacccacccgggacctcgctgtccagggactgcaacacttgcatttgccggaattcccagtggatctgcagcaacgaagagtgcccaggggaatgtctcgtgaccggacagtcacacttcaagagcttcgataatagatactttacttttagtggaatttgccagtacctgctcgcgagagattgtcaggaccattcgttctcgatcgtgatcgagactgtgcagtgcgcggacgacagggacgcagtgtgcacccggagcgtgaccgtcagacttcccgggctgcataactccctcgtgaagctgaagcacggagctggcgtggctatggatggccaggacgtgcagcttccgctcctgaaaggagatctgcgcatccaacacaccgtcaccgcctccgtgagactgagctacggggaggatcttcagatggactgggacggacggggccggctgctcgttaaactctccccagtgtacgccggaaagacctgtggattgtgtggaaattacaatggaaaccaaggagacgattttctcactccatccgggctggcagagccgagggtcgaggacttcggtaacgcgtggaaactgcacggtgattgccaggacttgcaaaagcagcatagtgatccgtgcgcactgaacccccggatgacccgcttctccgaagaggcttgtgccgtgctcacctcgcccactttcgaagcgtgccaccgcgctgtgagcccgctgccgtacctccgcaattgccggtacgatgtatgctcgtgttccgacggtcgggaatgcctgtgtggtgccctggccagctacgcggcggcgtgcgccggaaggggcgtgcgggtggcctggcgcgagcccggacggtgcgaactgaactgcccgaagggacaggtgtaccttcagtgcggaaccccttgcaatctcacttgtcgctcgctctcctatccggatgaggagtgcaatgaagcctgtctggaggggtgtttttgtcctccgggtctgtacatggatgagcgcggagattgcgtgccgaaggcccaatgtccctgctactacgacggtgaaatctttcaaccggaagatattttctcagatcaccacaccatgtgctattgcgaggatggattcatgcactgtactatgtcaggagtgccaggatcccttctccctgacgccgttctgtcgtcgccgctgtcgcacagatcaaagcgctccctttcatgccgaccaccgatggtgaagctcgtctgtccggccgacaatctgcgcgccgaggggctggaatgtactaagacttgccaaaactacgacctggaatgcatgtctatgggctgcgtgtccggatgcctttgccccccagggatggtgcgccatgaaaaccgctgcgtggccctggaaagatgcccatgttttcaccaggggaaggagtacgccccgggggaaactgtgaagatcggatgtaacacctgtgtatgccaggacagaaagtggaactgcaccgatcacgtttgtgacgccacgtgctcgactatcggaatggcccactacctgacgttcgacggtttgaaatatttgttcccaggagaatgccaatacgtgctggtgcaggactactgcggatcaaaccctggaacttttagaatacttgtcggaaacaaaggatgctcccacccctcggtgaagtgcaagaaacgcgtgactatcttggtggaaggaggcgaaattgaactgttcgacggagaagtcaatgtgaagaggccaatgaaggacgagactcactttgaagtggttgaaagcggtcggtacatcatactgctccttggcaaggcgctgagcgtggtgtgggatcgccatctgtccatctccgttgtgctcaagcagacttaccaggagaaggtgtgcgggttgtgtggtaacttcgacggtatccaaaacaatgatcttacctcctctaacttgcaggtcgaggaagatccagtcgacttcgggaacagctggaaggtgtcgagccagtgcgccgacacgagaaaagtccctcttgattcgtcgccagctacctgccataacaacatcatgaaacagactatggtcgactcatcgtgtcggatcctgactagtgacgtgttccaagattgcaacaagctggtcgaccccgaaccttacctcgacgtgtgcatctatgacacttgcagctgcgaatcaatcggggattgtgcatgcttctgcgacaccatcgcggcgtacgcacatgtctgcgcccagcacgggaaggtcgtcacctggaggacggccactctctgcccccagagttgtgaggaaagaaatctgcgggagaatgggtatgagtgcgagtggcggtacaactcgtgcgccccggcgtgtcaggtcacctgccagcaccctgaacctctcgcatgcccagtgcaatgcgtcgaaggatgccatgctcattgcccgccgggtaagatcctggatgagctgctgcaaacttgcgtggacccggaagattgccccgtgtgcgaagtggctggacggcgctttgcttcaggtaaaaaggtgaccctcaacccgtccgaccccgagcactgtcaaatttgccattgcgacgtcgtgaacttgacttgtgaggcatgtcaggaaccaggcggcctggtggtgccgccgaccgacgcgccggtgtcaccgaccaccctctacgtggaggacatctccgaaccacctctccacgatttctactgttcccgcctcttggacctggtgttcttgctggatggatcgtcgcgactgtcagaggccgaatttgaggtgctcaaagcattcgtggtggatatgatggaacggctgagaataagccagaagtgggtccgggtcgcagtcgtggagtaccacgacggatcgcatgcctacatcggtcttaaggaccggaagcgcccaagcgaattgaggcgcattgcaagccaagtcaaatacgctggatcccaggtggcaagcacctcggaggtgttgaaatataccctcttccagatcttttccaaaatcgaccgaccagaagctagccgcatcaccctcctgctgatggcgagccaggaaccgcagagaatgagccgcaacttcgtgaggtacgtgcagggactcaagaagaagaaggtgattgtcatcccggtgggaatcggtcctcacgcaaatctgaagcagatcagactcatcgagaagcaggcaccggaaaacaaggccttcgtcctgtcgagcgtggatgaactggagcagcaacgggatgagattgtgtcatacctttgtgacctcgctccggaggctccgcctccgaccctcccgcctgatatggcccaagtgaccgtcggccctggactgctgggcgtcagcaccctcggaccgaagagaaactcgatggtgctggatgtcgccttcgtactggaaggctcagacaagatcggagaggccgactttaaccgctctaaagagtttatggaggaagtgatccaaaggatggatgtgggacaagactcgatccatgttaccgtgctgcaatactcgtacatggtgaccgtggaatacccgttctcggaggcccagtcgaagggcgatatcctccagcgggtgcgggagattagataccaaggaggaaaccggacgaacaccggtctggctttgcggtacctgtctgaccacagctttctcgtgagccaaggcgaccgagaacaggccccaaatctggtgtacatggtcactggaaacccggcctcagatgaaatcaagcgcctgcctggagacatccaagtcgtccccatcggcgtggggccaaacgcaaacgtgcaggagctcgaacgcattgggtggccaaatgctccgatcctgattcaggacttcgagactctccctcgggaagcaccggatttggtcctgcagcggtgttgctccggcgaaggactccagatccctaccctgtcaccagccccggattgctctcagcctctcgacgtgatcctcctgctcgatggaagctccagcttcccagcctcatacttcgacgaaatgaaatcattcgcgaaagccttcatcagcaaagccaatatcggcccacggctcacccaagtgtccgtccttcaatacggctcgatcactaccatcgatgttccgtggaacgtggtccctgagaaggctcacctcctctcgctggtggatgtgatgcagcgcgaagggggaccatcacagatcggcgacgctctgggatttgccgtgcgctacctgacttcggaaatgcacggtgcacggccgggggcctcgaaggcggtcgtgatcttggtcaccgacgtctcggtggactcagtggatgcggccgccgatgcggcgaggtccaaccgcgtcacggtgttcccaatcggtatcggagacagatatgacgccgcccaactgcgcattctggccggacccgccggagactcgaacgtggtgaaactgcagcgcatcgaggacctgccgacgatggtgactttgggcaattccttcctgcacaagctctgcagcggattcgtccggatctgtatggacgaggatggcaatgaaaaacggccgggagacgtctggaccctgccggaccaatgccacacggtgacgtgtcaaccggacggtcagaccctgctgaagagccacagggtcaactgtgaccggggactccgcccctcttgcccgaactcccaaagccctgtgaaggtcgaagaaacgtgtggatgccgctggacctgcccttgtgtgtgtaccggttcctccactcgtcacatcgtgactttcgacggccagaacttcaagctcaccgggtcatgctcatacgtgttgttccagaataaggagcaggatctcgaagtgatcttgcataacggggcgtgcagccctggagcacgccaaggatgtatgaaatcgatcgaagtgaaacatagcgcgctgtctgtggaacttcacagcgatatggaggtcaccgtcaatggcagactcgtgtccgtgccttacgtcggaggcaacatggaggtgaatgtgtacggagcgatcatgcacgaagtcagattcaatcatctcggacatatcttcaccttcaccccacagaacaacgaattccaattgcagctgtcgccgaaaactttcgcatcaaaaacgtacggactttgcggcatttgcgacgaaaacggcgctaatgacttcatgctccgggacggaaccgtcactactgattggaaaacgctcgtgcaggaatggaccgtgcagcggccggggcagacgtgtcagcccatcctggaggaacagtgtctcgtgccggatagcagccactgccaggtcctcttgctgccacttttcgccgaatgtcacaaggtgctggctccagcgactttttacgctatctgccagcaagattcctgccaccaggaacaagtgtgcgaggtgatcgcatcatacgcacacctgtgccgcacgaatggtgtgtgcgttgattggcggacgccggacttctgcgccatgtcgtgccctccaagtctggtctacaaccattgcgagcacggatgtccacggcactgcgatggtaacgtgtcgtcctgcggggatcatccgtcggaggggtgcttttgtccgccggacaaggtaatgctggaaggatcctgcgtgcctgaagaagcgtgcactcagtgcatcggcgaggacggcgtgcaacatcaattcctcgaagcctgggtgccggatcaccagccgtgtcagatctgtacttgcctgtcgggacgtaaggtgaattgcactacccagccgtgcccgactgccaaagcgcctacctgtggcctctgtgaagtcgccagactgagacagaacgcggaccagtgttgcccggagtacgaatgtgtctgcgatcctgtgtcctgcgacttgccgccggtgccgcactgcgaaagggggctccaacccacgcttactaacccaggcgagtgccgccctaatttcacttgcgcctgccggaaggaagagtgcaagcgtgttagccctccatcctgtccgccgcaccgcctgcccaccctgaggaaaactcaatgctgcgacgaatacgaatgcgcatgtaattgcgtcaattcgactgtctcatgcccgctgggctacttggcctcgaccgctacgaacgactgcggatgtaccactaccacttgcctcccagacaaggtctgcgtccataggtcaaccatctaccccgtgggccaattttgggaggagggttgcgatgtctgtacctgcaccgacatggaggatgcggtgatgggactgcgcgtggcacagtgcagccagaaaccatgtgaggactcatgtcgctcgggatttacttacgtgctgcacgaaggtgaatgctgcggtcgctgcctgcctagcgcatgcgaggtcgtgactggttcaccgcggggagactcccagagctcatggaagagcgtgggaagccaatgggcatccccagagaacccctgcttgatcaacgaatgcgtgcgcgtcaaggaggaggtttttattcagcagagaaacgtgagctgcccgcaacttgaggtgccggtctgcccgagcggtttccaactctcctgcaaaacctcggcgtgctgcccatcatgccgctgcgagcggatggaggcgtgcatgctcaacggcaccgtgatcggcccgggcaagaccgtgatgatcgacgtctgcaccacgtgccggtgcatggtccaggttggagtgatctcgggcttcaagttggaatgccgtaagaccacctgcaatccatgcccactggggtataaagaagagaataacactggagagtgctgcggaagatgccttccaactgcctgcactatccagctgagaggagggcagatcatgactctgaagcgcgatgagactctgcaagacggatgcgacactcatttttgcaaagtgaacgagcgaggagaatacttctgggaaaagcgagtcaccggatgccctcctttcgacgaacataagtgcctggccgagggcggcaagattatgaagattcccggaacttgctgtgatacctgtgaagaacccgaatgtaatgacatcacggcccgcctgcagtacgtcaaagtgggatcctgtaaatcggaagttgaggttgatattcactactgccagggaaaatgcgcgagcaaggcgatgtactcgatcgatatcaacgacgtgcaagaccagtgctcgtgctgtagccctactcgcactgagccgatgcaagtcgcgctccactgcactaatggctcggtggtgtaccatgaagtgctgaacgcaatggaatgtaagtgctccccgagaaagtgctcgaag

SEQ ID NO: 21337 - DNA, 8439 bp, synthetic construct
  misc_feature 1..8439: note = source = /note="Description of Artificial Sequence: Synthetic coding sequence"
  source 1..8439: mol_type = other DNA
atgataccagcaaggtttgccggggtgctgctagcactggccctcatcctgcctggcaccttgtgtgcagagggtacaagagggcgttcatcaacagcacggtgctcgctgttcggctcagacttcgtaaacactttcgatggatccatgtatagctttgccggatactgctcttatctgctagcaggaggttgtcagaaaagatctttttctattatcggtgatttccaaaacggaaaaagggtctctctctcggtgtatctgggtgaattcttcgacatacatctgttcgttaacggcaccgtgacccagggggatcagcgcgtgtccatgccctatgcatccaaggggctgtatctcgagaccgaggctggatactacaaactgagcggcgaggcctatggctttgtggcacgtattgatggctcagggaactttcaagtgctgctgagtgataggtatttcaataaaacatgtgggttgtgtgggaattttaatatttttgccgaggacgacttcatgacccaggagggaaccctgacctcggacccttatgactttgcaaattcctgggctctgagcagcggggagcagtggtgcgagcgggccagtcccccgtcctcaagctgcaatatttcttctggcgagatgcagaagggactatgggagcagtgtcaacttctgaaatctaccagcgtcttcgcgcggtgtcatccacttgtagacccggaacccttcgtagctctgtgtgaaaaaacactgtgcgaatgcgccggtggactggagtgcgcctgcccagccctcctggaatatgctcgaacatgtgctcaggagggaatggttctttacggctggaccgaccacagtgcctgtagtccggtatgccctgccggaatggagtataggcagtgcgtgtccccatgtgcacgaacttgtcaatctctccatatcaatgagatgtgccaggagaggtgcgtcgatggatgttcatgccccgaaggtcagctgctggacgagggcctctgtgttgaatcgaccgagtgcccttgtgtccatagtggcaagaggtatccacctggcacaagtctgtcacgagattgtaatacctgcatctgtagaaactctcagtggatctgctccaacgaagaatgccctggcgaatgcctcgtgacaggacagtcacactttaagtcctttgataatagatattttaccttcagcggaatctgccagtatctgctcgctagagattgccaggaccatagcttctctattgtgattgagactgttcagtgtgctgatgatagggacgccgtgtgcactaggtcagtgaccgtaagactacctggcctgcacaatagcctggtgaaactgaagcatggtgcaggcgtggccatggatggacaggacgtgcagctcccactgctcaagggagacttacggattcagcataccgtgaccgcctcggtacggttatcttatggtgaggacctacaaatggactgggatggtaggggcaggctgctggtaaagctttcccctgtctacgcggggaagacctgtggattgtgcggaaattataacggcaaccaaggggacgactttctgacccctagcggcctggctgaaccaagagtagaggatttcgggaacgcctggaagctgcacggagactgccaagatctgcagaagcagcattctgacccatgtgctctgaaccctcgaatgacaaggtttagtgaggaggcgtgcgctgtgcttactagccctacttttgaggcatgccatcgagccgtttcgccgttgccatatctcaggaactgtcgctacgacgtatgtagctgctcagacgggagagagtgcctctgcggtgctttggcttcttacgctgcagcatgcgcaggaagaggagtgcgcgtagcatggagggagcccggcaggtgcgagctgaattgccctaaagggcaagtttatctgcaatgtggtaccccctgcaacttgacctgtcgatccttgagctacccagacgaggagtgcaatgaggcctgtctggaaggttgtttctgcccccccggcctctatatggatgaaaggggagactgtgtcccaaaggcgcagtgtccctgttactatgacggagaaatatttcagccagaggacattttttctgatcaccataccatgtgttactgtgaggatggatttatgcactgtacaatgtcgggcgtaccgggctcacttctccctgatgctgtgctatccagtcccctgagtcacaggagcaagaggagcttgtcctgtagaccgcctatggtgaaactggtctgtccggctgacaatcttcgagccgagggcctggagtgcaccaaaacttgtcaaaactatgacctggaatgcatgagtatggggtgtgtttccggctgtctctgccctccaggcatggtcaggcacgaaaatcggtgtgtggccctggagcggtgcccttgtttccaccaggggaaagagtacgcccctggggagactgtgaaaatagggtgcaacacatgcgtgtgccaggacagaaaatggaattgtacagaccatgtgtgcgatgctacgtgtagcaccatcggaatggctcattatttaacctttgatggtctgaaatacctattccctggtgaatgccagtatgtcttagtgcaagattactgtggtagcaacccaggtactttcaggatcctcgtgggcaacaagggttgcagccacccctccgtcaaatgcaagaaaagggtgaccatcctagtggagggcggagagattgagctgttcgacggagaagtcaatgtgaaacgcccaatgaaagatgagacccactttgaagtggtggagagcgggagatacatcattctgttgctgggaaaagcattgagcgtagtgtgggatcgccacctctctatttcagtggtactgaagcagacataccaggaaaaggtctgcggcctctgtggtaattttgatggaatccagaataacgaccttacatcatctaacctccaggtggaagaagatcccgtagactttgggaacagctggaaggtttccagccagtgcgccgacacccgcaaagttccacttgacagctcgccagccacctgccacaataatatcatgaagcaaacgatggtggattcttcttgtaggatcctgacatcagacgtctttcaggattgcaataagctagtggacccagaaccctacctggatgtttgtatatatgacacctgctcctgtgagtcaatcggagactgcgcctgtttctgtgatacaattgcggcatatgctcacgtgtgtgcgcagcacggcaaggttgtcacttggcgcactgccaccttatgtccccaatcatgtgaggagcgtaatttgcgtgaaaatggatacgagtgcgaatggagatataattcatgtgccccggcttgtcaggtgacctgccaacatcctgagcctctggcatgtcccgtgcaatgtgtggagggctgtcatgctcactgtccacctgggaagattctggacgagcttctccagacatgtgtggacccggaggactgtcccgtttgcgaggtggccgggagacgttttgcatcgggcaagaaggtcactttgaatccatccgatccagaacattgtcagatctgccattgcgatgtggtcaacctgacttgtgaagcatgtcaggaaccaggcggattagtggtaccgcctacagatgcccccgtctctcccaccaccctgtatgttgaggatatctccgagccacccctccatgatttctattgctcacgcctgctagacttagtgttcctgctggatggaagtagtcggttgtccgaggcagagttcgaagtgctgaaggccttcgttgtggacatgatggaacgtttacggatatctcagaagtgggttagagtggctgttgttgaatatcacgacggctcccacgcatacattgggcttaaggatcggaagcgaccctccgagctgcgacggattgcgagccaggttaagtatgctggtagtcaggtggcatcaacttccgaggttctgaaatacacactctttcagatcttcagcaaaattgatcggcccgaggcttcaagaattaccctgttactgatggcaagccaagagccacagcggatgtctcgcaactttgtgcgctatgtgcagggcttgaagaaaaagaaagtgattgtgattcctgtcggaatcggacctcatgccaacctgaaacagatcaggctgatagaaaaacaggctccagaaaataaagcattcgttctttcatctgtggatgagcttgagcagcagagggacgagatagtttcatatctgtgtgacttggcacctgaagccccccctccgacgcttcccccggatatggcacaggtgacagtgggacctggcttgctgggcgtgagcaccctgggccccaagcggaactctatggttctcgacgttgcattcgtcctcgagggttcggataagattggtgaggctgactttaacagatctaaagagttcatggaagaggttatccaaaggatggatgtgggacaggattccattcacgtgaccgtgctccagtactcttatatggtgacagtcgagtacccgttttctgaagcacagtctaaaggggatatcctgcaaagagtcagggagattagataccaaggtgggaacagaactaataccgggctggccctgcgttatctatctgatcactcctttctagtgtcacagggcgatcgcgaacaggcgcccaatctggtttacatggtgacgggaaatcctgctagtgatgagattaagagactgcccggcgatatccaggtcgtacccatcggagtgggccccaacgccaacgtccaagagctggagcgaattggatggcccaacgcacccattctgatccaggatttcgagacccttcccagagaggcacccgacttggtgctgcagagatgctgctccggggagggcctgcagatcccgaccttgtcacctgctccggactgttcgcagccactcgacgtcattctcctgctagatggctcatcatccttccccgcgtcctacttcgacgaaatgaaatccttcgcaaaagcttttatctcaaaggccaacattggtcccagactgacacaggtatctgtgttgcagtacggctccatcaccacaattgatgtgccctggaacgttgtgccagaaaaggcccacttattatcacttgtggacgtcatgcaacgggaggggggcccttcccaaattggggatgccctggggttcgctgttcggtacttgacatccgaaatgcacggagcccgccctggagcgtctaaagctgtggtaatcttagtcactgacgtttcggtggatagtgtggacgcagcggccgatgcagcccggagcaaccgggttactgttttccctattggcattggcgacaggtacgatgctgcccaactcagaatccttgctggacctgccggtgattcaaacgttgtgaaactgcaaagaatcgaggatctgccaacgatggtgacccttggtaattcgttcctgcataaattgtgttctggtttcgtgcggatatgcatggacgaagacggtaatgagaaaaggccgggagacgtgtggacactgcctgatcagtgccacacggtcacctgccagcctgatggccaaacactcctgaaatcccacagggtcaattgcgatagaggacttagaccgtcctgccctaattctcagtctcccgtgaaggtcgaggagacctgcggctgtcgatggacatgtccttgtgtctgtaccggctcgtccacacgtcacatagtgacttttgacggacaaaactttaagctcaccgggtcatgtagctacgtactgtttcagaacaaagaacaagacctggaggttatcctgcataatggcgcttgtagtcctggagcaaggcaagggtgtatgaagtcaatagaggtgaagcactcagctctgtcagttgaactccacagtgacatggaggtgaccgtgaacgggaggctggtgtcagtgccctacgtgggcggaaatatggaggtgaatgtgtatggcgccatcatgcatgaggttcggtttaatcacttggggcatattttcacatttacccctcaaaacaacgagttccagctgcagctcagtccaaagaccttcgcttccaaaacttatggactgtgtggcatctgtgatgagaacggggcaaacgatttcatgctgcgggatggcacagtcacaacagattggaagactctggtccaggagtggacggttcagcggcctggccagacctgtcagccaatcctggaagagcagtgtctggttcccgactcctctcactgtcaggttctgctgctaccactattcgctgaatgccataaggtgctagcccctgccacgttctatgcaatctgccagcaggattcctgtcaccaggagcaggtgtgtgaagtaattgcctcctatgctcacttgtgtcgaactaacggggtctgcgtggattggcggacccccgatttttgcgccatgagctgccccccatctctggtctataaccattgcgaacacggctgcccccgacactgcgacggtaacgtcagctcgtgcggtgaccatccaagtgagggctgcttttgtcctcccgacaaagtcatgctcgaggggtcatgcgtgcccgaggaggcctgtactcagtgcattggtgaggacggtgtacagcaccaatttcttgaggcttgggtgcctgaccaccagccatgtcagatttgtacttgcctgtctggacgtaaagtgaattgcacaactcagccctgtccaacagccaaggcccccacatgcggactctgcgaagtcgcccgcctacgacaaaatgcagatcagtgctgccctgagtatgaatgtgtgtgtgatccagtcagttgcgatctgccccctgttcctcattgtgaaagaggcttacaacccacactaacgaaccctggggaatgccgacccaactttacctgtgcctgccggaaggaggaatgcaaaagagtgagcccaccctcatgccccccccatcgtttgccaacacttcggaaaacccagtgttgtgacgagtacgaatgtgcttgcaactgcgtcaattccactgtgtcctgccctctggggtacctagcatctaccgctacaaacgattgtggatgtacgactactacgtgccttcctgacaaagtgtgtgtccacaggtccacaatataccctgttggtcagttttgggaggagggctgtgacgtgtgtacttgcaccgacatggaagacgcagtcatggggctgagggtggcccagtgcagccagaaaccgtgcgaagattcttgtagatcaggtttcacttacgtgcttcatgaaggcgaatgttgtggccgctgcctcccctctgcctgcgaagtcgtgactggttctcctcgcggggactcccaaagttcctggaagagcgtaggatcccagtgggcatcccccgaaaatccctgcctgataaatgagtgtgtccgtgtaaaagaggaggtttttattcagcagcggaacgtttcctgcccacagttggaggtaccggtgtgccccagcggatttcagctatcttgtaagacatccgcctgttgtcccagctgccgatgtgagaggatggaagcctgtatgttgaatgggaccgtgatcggtccaggcaagacagtgatgatcgacgtttgtactacatgccgatgtatggttcaggtgggcgtgattagtggctttaaactggagtgtagaaagaccacctgtaatccttgtcccctcggctacaaggaggagaataacacaggagagtgctgcggtagatgcctgccgactgcgtgtactatccagctccggggggggcagatcatgacactgaagcgggacgaaaccctacaagacggctgcgatacacatttctgcaaggtgaacgaacggggcgagtacttctgggaaaaaagagttaccggctgccccccttttgatgagcataaatgtctcgccgagggcggaaaaattatgaagatacccggaacttgctgcgatacctgtgaggaaccggagtgtaacgacatcaccgcccggctgcagtacgttaaagtcggaagctgcaaatccgaggtggaagtggacatccactactgtcagggaaaatgcgcaagtaaggctatgtactcaatagacattaatgacgtgcaggaccagtgcagctgttgttccccgacacggacagaaccgatgcaggtggctcttcattgtactaatggctccgtggtataccacgaggtgctgaacgctatggagtgcaagtgctctccacgcaagtgtagcaag

SEQ ID NO: 21338 - DNA, 8439 bp, synthetic construct
  misc_feature 1..8439: note = source = /note="Description of Artificial Sequence: Synthetic coding sequence"
  source 1..8439: mol_type = other DNA
atgattcctgcaagattcgctggggtcctcctggctctcgcgctcatcttgccaggaaccctttgcgcggaaggaacgcgcgggaggagctccaccgcgaggtgctcactgttcggcagcgacttcgtgaatacattcgacggctctatgtacagctttgcaggatattgcagttacctgctggctggaggctgccagaaaagatcctttagtattatcggagactttcaaaacgggaaaagagtgagcctgtctgtgtacctcggagagttctttgacatacatttgttcgtgaacggtaccgtgacacagggcgatcagcgcgtgtcaatgccatacgctagcaaaggcctctacttggagacagaagccggctactataaactctccggcgaagcatacgggtttgttgctaggatcgatggctcaggtaattttcaggtcctcttgtcagatcggtactttaacaaaacatgcggactgtgcggaaatttcaacatcttcgctgaagacgatttcatgacacaggaaggaaccttaacaagcgatccatacgacttcgcaaattcatgggcattatcaagcggagaacagtggtgcgaaagggcctctcccccctctagttcttgtaacatttcctctggtgagatgcaaaaggggctgtgggaacagtgccaactgctgaagtctacctctgtgtttgcacgatgccatccactggtggaccctgagccctttgtcgctctgtgtgagaaaaccctgtgcgagtgtgcaggagggttggaatgcgcctgccccgcactgctcgagtacgcacgtacctgcgcgcaggaaggcatggtcttgtatgggtggaccgatcatagtgcttgcagccctgtgtgccccgccgggatggaataccgccagtgcgtctctccctgcgctaggacctgccagtctctgcacattaacgagatgtgccaggagagatgcgtggacggctgctcatgccccgaagggcagctgcttgacgaaggactttgtgtggaaagcacagaatgcccatgcgtccatagcggcaaacgatacccacccggaacctcactttcgagagattgcaacacctgtatctgcagaaactctcagtggatttgttctaacgaagagtgtcccggggagtgcctggtgacaggccaaagtcattttaaaagcttcgacaacaggtattttacgttcagcggcatctgccagtaccttctggcaagagactgtcaggaccactctttctcgatcgtcatcgagaccgttcagtgcgcagatgatagggatgcggtttgcacaaggagtgtgacggtccgcctgccaggccttcacaactccttggtgaagctgaaacatggtgcgggcgtcgcaatggacggccaagacgttcagcttccgctgctgaagggagacctgcgcatccagcacacggtgacggcctccgttcggctttcctacggagaagatctgcaaatggattgggatgggaggggccgtctcttagtgaaactgtcccctgtttacgccggaaaaacctgtggcctgtgtggaaactataacggaaaccaaggcgatgactttctgaccccttctggtctggctgagcctcgggtggaggactttggaaacgcatggaaactgcatggagactgtcaagatctgcagaaacagcattctgatccatgcgcactcaacccacgcatgacacgtttttcagaggaagcatgcgcagtgctgaccagcccaacttttgaggcgtgccatagagcggtcagccccttgccttatctgaggaactgcaggtacgatgtctgtagctgctcggacggaagggagtgcctgtgtggagcactggcctcatacgcagccgcctgtgctggacgtggagttcgcgtggcttggcgggagccagggaggtgcgaattaaactgtcccaaggggcaagtatacttgcagtgtggcacaccttgcaatctcacatgccggagtctgagctatccagacgaggaatgcaatgaggcatgcttggagggatgcttttgtccccctggcctgtacatggacgagcgtggcgattgcgtgcccaaagctcagtgtccgtgctattacgatggagagatttttcagccagaagatatattctctgatcaccacaccatgtgctactgcgaagacggatttatgcactgcacaatgtctggagttcctgggtccctgctccctgacgctgtcttgagttccccattgtcccataggtctaagagatccttgtcttgtagaccaccaatggtcaaacttgtgtgcccagctgacaatctccgtgcagagggactggaatgtactaaaacgtgccaaaactacgatctggaatgcatgagtatgggctgcgtgtccggttgtctgtgtcctccaggaatggtcagacacgaaaaccgctgcgtggctcttgagaggtgcccttgctttcaccagggtaaagagtacgctcctggagaaaccgtcaagattggctgtaatacttgcgtctgtcaggatagaaaatggaattgcaccgatcacgtctgtgacgctacttgctcgactataggaatggcgcattaccttacatttgacggtctgaagtatctcttcccgggtgagtgccagtatgttctcgtgcaagattactgcggatctaaccccggaacctttagaattctggtgggaaacaaaggctgtagccatccttctgtcaaatgcaagaagagggttactatcctggttgaagggggcgaaatcgagctgttcgacggcgaagtgaatgtgaagaggccgatgaaggacgagacccactttgaagtggttgaaagcggaaggtacatcatcttgctcttgggaaaagctttatccgtagtgtgggacagacacttgtctatcagcgtcgtcctgaagcagacataccaagagaaagtatgcggcctctgtggcaattttgatggtatacaaaacaacgacctcaccagtagcaacctgcaagtcgaggaagacccggtggacttcggaaacagttggaaggtcagttctcaatgcgctgatactaggaaggtccctcttgattcctctccagctacctgccacaacaacatcatgaagcaaaccatggtggactccagctgtcggatcctgacaagcgacgtcttccaggattgtaacaaactcgtggacccagaaccgtacctggatgtttgcatctatgacacttgcagctgcgaaagcatcggggactgtgcctgcttctgtgatacaatcgccgcatatgcacacgtctgtgcacagcacgggaaagtggtgacctggagaactgctactttgtgcccacagagctgcgaggaacgtaaccttcgcgagaacggatatgagtgcgaatggaggtacaactcttgcgctccagcttgccaagtgacgtgtcaacacccagagccactggcgtgtccggtgcaatgcgtagaagggtgccacgctcactgcccgccggggaagatattagatgagttactccagacatgcgtcgacccagaggactgccctgtgtgcgaagtggcaggaagaaggtttgcaagcggaaagaaggtgacactcaaccccagcgacccggaacactgccagatttgccattgcgatgtcgtcaacctgacatgcgaggcatgtcaagagcctggagggctggtcgtcccaccaaccgacgcacctgtatctcctactacattgtatgtggaagatatctctgagcctccattgcatgatttctattgctcaaggctgctggatttagtcttcctgctagacggatcctcgcgacttagcgaagctgagttcgaggtccttaaagcattcgttgtggatatgatggaaagacttcgcattagccaaaaatgggtgagagtcgctgtggtcgaatatcacgacgggagccatgcctacattggcttgaaggaccggaaacggccaagcgagctgagaaggatcgcttctcaagttaaatacgctggctcacaggtcgccagcacgagcgaggtccttaagtacaccctgtttcaaatctttagcaagattgatcgcccggaagccagtaggatcaccctgctgctgatggcctcacaggagcctcagaggatgtcccgcaattttgttagatacgtacagggactcaaaaaaaaaaaggtgatcgtgatacccgtcggcattggcccccacgcaaacctgaaacagattagacttatcgaaaagcaggcaccagaaaacaaggcttttgtgcttagctccgtggatgagcttgaacaacaaagggacgagatcgttagttacctctgcgatctggcgcctgaggctccccccccgacactgcctccagatatggctcaagtcaccgtcggtcccggactgctgggagtcagcacattgggacccaaaagaaactcaatggttctggatgtcgcattcgtgttggagggaagcgacaaaatcggagaagccgattttaataggagcaaggagttcatggaagaagtcatccagaggatggatgtcggccaagactctatccatgtcaccgtgttacagtatagttacatggtcaccgtcgaataccccttttctgaagcacagagtaaaggcgacatactgcagcgcgttagggaaatcaggtatcaagggggaaatagaacgaacaccggacttgccttgagatacctatccgaccacagcttcctggtaagccaaggcgacagagagcaagcaccgaacttggtttatatggttaccggaaaccctgctagcgacgaaatcaaaaggctcccgggcgacatccaagtggtgcctatcggcgtaggcccaaatgcgaatgtgcaagaactcgaacgcatcgggtggcctaatgcaccaatcttgatccaagatttcgaaaccctcccacgggaagcccctgatctggtgctgcagaggtgctgctccggcgaaggccttcagattccaactctgagccccgcccctgattgcagccagcctttagatgttatcctgctgttggatggcagctcctcatttcccgctagttacttcgacgaaatgaaaagctttgccaaggctttcatttccaaggctaacatcggacccaggttgactcaagtatccgttttgcaatatgggagcatcaccactattgatgtgccatggaacgtagtccccgaaaaagcacaccttctgtccctggtcgatgtgatgcagagggagggaggtccttcccagattggtgatgcactgggctttgctgttaggtatttaacgagtgagatgcatggggctaggccaggagctagtaaggctgtggtgatcctcgtgaccgacgtgtctgtggacagtgtggatgcagccgctgatgctgctcgctctaaccgtgtcaccgtatttcctatcggaatcggagataggtacgatgctgcccagctccgaattctggccggccccgcgggcgattcaaacgtggtgaaactgcagcgaattgaggatctcccaaccatggtaactctggggaattcctttttgcacaaactgtgcagcggcttcgtcagaatctgcatggatgaggatggcaatgaaaaacgccccggcgatgtctggaccctgccagatcaatgccacaccgtgacgtgtcagcctgacgggcaaacgctgctgaagtcacatagagttaactgcgatcgcggtctccgcccctcctgccctaactcccaaagtccggtaaaggtggaagaaacatgtggttgcagatggacgtgcccatgcgtctgcaccgggtcttctactaggcacatcgttaccttcgatggacaaaacttcaagctgactgggagttgcagctacgtgttgtttcaaaataaagaacaagacctggaagtcattcttcataatggtgcatgcagtccaggcgctagacaagggtgtatgaaatcgattgaagtcaagcacagcgcactgtcagtggagctgcacagcgatatggaggtgaccgtgaatggcaggctggtgtccgtgccctatgtgggcggtaacatggaagtgaacgtgtacggtgcaatcatgcatgaagttcggttcaaccacctgggacacatcttcactttcaccccccagaacaacgagttccagctgcagctgagtcctaagacctttgctagcaagacgtacggcctgtgtggaatctgtgacgaaaacggcgcaaacgactttatgctgagggacggaacagtgacgaccgattggaaaacactcgtacaggagtggactgtccagaggcccggacagacctgccaacctatcctagaggaacagtgcctggtgcccgattcctcccattgccaagtactgttgttaccactcttcgctgagtgtcacaaagtgctggcccctgccacgttctatgcaatatgccagcaggattcctgccaccaggagcaggtgtgcgaggtcatcgctagctacgcccacctctgcagaaccaacggagtgtgcgtagattggaggacacctgacttctgtgccatgagctgcccgcctagcctggtctataaccactgtgaacatggatgccctcgacactgcgatgggaacgtgagttcctgcggcgatcatccatctgaaggctgcttctgccctcccgacaaggtgatgctcgagggctcctgcgtgcccgaggaggcttgcacacaatgtatcggagaagacggagtccagcatcagttcctggaggcttgggtgcccgatcatcagccgtgtcaaatttgcacctgcctgtctgggagaaaggttaattgcaccactcaaccttgccccacagcaaaagcccccacctgcggattgtgtgaagtggccaggctcaggcagaacgcagatcaatgttgccccgagtatgagtgtgtctgcgacccagtatcatgcgatctgccccccgtccctcattgcgagagggggcttcaaccaacactcaccaaccctggcgaatgcagacctaatttcacatgcgcatgcagaaaggaggagtgcaaaagagtgagcccaccgagctgcccgccccatagactgcctacactcaggaagactcagtgctgtgatgaatatgagtgcgcatgtaattgcgttaatagtaccgttagctgcccactcggttatctggccagtacagccaccaacgactgcggatgcaccacaacaacctgcctccccgacaaggtatgcgtgcacagatcaaccatctatcctgtggggcaattttgggaagagggttgtgacgtctgcacctgtacggatatggaggatgctgtcatgggacttcgcgtggctcaatgctcccagaagccatgtgaagattcctgccgcagcggattcacatatgtgttgcacgaaggcgaatgctgcggccggtgtctgccctcagcgtgtgaggttgttactggctctcccaggggagacagccagtcttcgtggaaatctgtgggctcccagtgggcatcccccgaaaatccttgtttaataaacgagtgcgttcgcgtgaaggaggaagtctttatccaacaaagaaacgtcagttgcccacagctggaagtcccagtttgtccatctggattccaactgtcctgcaaaacatccgcctgctgtccaagctgcaggtgcgaacgcatggaagcatgcatgctcaacggcacagtcatcgggcccggtaagactgtgatgatcgacgtttgtactacttgccgctgcatggtgcaagttggcgtcatcagcggcttcaaactcgagtgtcgcaaaacaacctgcaacccatgtcctcttgggtacaaggaggaaaacaacacaggagagtgttgtggccggtgcctacccaccgcatgtacaattcagttgcgaggcggtcaaatcatgaccttaaagcgcgatgaaactctgcaagacggttgcgacacccacttctgcaaagtcaacgagcgcggcgagtatttttgggaaaagagggtgactggttgtcccccgttcgatgagcacaagtgtttggctgaggggggcaagataatgaagatcccaggcacttgttgcgatacttgtgaagagcctgagtgcaatgacattaccgcgaggctgcagtacgttaaagtggggtcttgtaagagtgaagtagaggtcgatatccattactgccagggcaagtgcgcgtcgaaagccatgtatagcattgacattaacgatgttcaggatcaatgtagctgctgctctcctaccaggactgagcctatgcaggtggcactccactgtactaacggcagcgtagtgtatcatgaagtgctcaatgccatggaatgcaagtgttcaccccgcaaatgttcaaag

SEQ ID NO: 21339 - DNA, 8439 bp, synthetic construct
  misc_feature 1..8439: note = source = /note="Description of Artificial Sequence: Synthetic coding sequence"
  source 1..8439: mol_type = other DNA
atgatcccagctaggttcgctggagtcctgctggcactggcattgatcctccctggtaccctctgtgccgaaggtactcgcggaaggagttccacggcaaggtgttctctctttggatccgattttgtgaacacatttgacggcagcatgtactcctttgctggatattgcagttaccttctggctggtggctgtcagaagcgctctttctcaatcataggagactttcagaatggtaagcgcgtttcactttccgtctatcttggagaattcttcgatatccacttgtttgtgaacggcaccgtcacccagggcgatcagcgcgtctctatgccttacgctagtaagggcctctacttggagactgaggcaggctattacaaactgagcggcgaagcctacggctttgtcgcaaggatcgacggtagcggaaatttccaggtccttttgtctgaccgctactttaataagacctgcggcctgtgtggtaacttcaatatcttcgcggaggacgacttcatgactcaagagggcactctgacaagtgacccctacgacttcgccaactcctgggctctgagttccggtgagcagtggtgcgagagagcctcacccccttcttcctcttgcaacattagttctggagagatgcaaaagggcctgtgggaacaatgccagctgctcaaaagcacctcagtgttcgctcgctgtcatccactcgtagatccagaaccttttgttgcgctgtgtgagaaaaccctgtgcgaatgtgctggcggcctggaatgtgcctgtcccgccctcctggaatacgctcgcacctgcgctcaagagggcatggttctttacggctggaccgatcacagcgcatgcagccccgtgtgccctgccggaatggaatacagacagtgtgtctctccatgcgctaggacttgccagagcctgcatatcaatgagatgtgccaggaacgctgcgttgacggatgctcttgcccagagggtcagctccttgacgaaggtctctgcgttgagtccaccgaatgcccatgtgtccactcaggtaagagataccctccaggtaccagcctgagccgcgattgtaacacatgcatctgtcgcaacagccagtggatctgcagtaatgaggagtgccccggagaatgccttgtgacaggacagagccattttaagagtttcgacaaccgctatttcaccttctccggaatctgccagtacctgcttgctagagactgtcaggaccactcttttagtatcgtgatcgaaaccgtgcaatgcgccgacgacagggacgccgtgtgtacccgctccgtcacagtgaggctgccgggtcttcacaacagcctggtgaagctgaagcatggagcaggcgtggccatggacggccaagacgtgcagcttccgctcctgaagggtgacctgcgcatccagcacactgtgacagcatctgttaggttgtcctatggagaggatttgcagatggattgggacggaagaggcaggcttctcgtgaagctgtctcccgtttacgctggcaagacctgcggattgtgcggcaactacaacggcaaccagggtgacgatttcctgacaccttcaggactcgcagaaccaagggtcgaagacttcggaaacgcctggaaacttcacggagattgccaggacctgcagaagcaacactcagatccttgtgctctgaatccaagaatgacgaggtttagtgaggaggcctgtgccgtactgacaagccccacgttcgaagcctgtcaccgcgcggtgagcccccttccgtacctcaggaattgccgctacgatgtgtgttcatgttctgatggtagggagtgcctgtgtggcgctctggcatcctacgcggcggcctgcgccggtcgcggcgtgcgcgttgcttggagggagccaggtaggtgcgagctcaattgtcctaagggtcaggtgtacctccagtgtggaaccccgtgtaacttgacttgccgctctctctcatatccagacgaagagtgcaatgaagcttgcctggagggatgcttttgccctcctggattgtacatggatgaacgcggtgattgcgtgcctaaagcacagtgcccctgctattacgatggagaaatcttccagccggaggacatcttttcagatcaccacaccatgtgctactgtgaggatggcttcatgcactgtacgatgtccggagtgcccggctcattgctgccagatgctgtcctgagttcacccctcagtcaccgctcaaagaggtcactgtcctgcagaccccctatggtcaaactggtatgcccggccgataaccttagggcagagggactcgagtgcaccaagacttgccagaattacgacttggaatgcatgagcatgggctgcgtttctggttgcctctgcccccccggtatggtgaggcacgaaaacagatgcgtcgcgcttgaacgctgtccatgcttccatcagggcaaggagtatgcccccggcgagactgtcaagatcggctgtaatacttgcgtatgtcaggaccgcaagtggaactgtacagatcacgtgtgcgacgctacctgcagtactataggaatggcccattatctcacattcgatggcctgaagtacctgtttccgggcgagtgccaatacgtgctggttcaggactactgtggttctaaccctggaacttttaggatcttggtgggtaacaagggatgtagtcacccaagtgtaaagtgtaaaaaaagagtcaccatcctcgtagaaggaggagagatcgaactcttcgacggtgaagtgaatgtgaagcgccccatgaaggacgagacacacttcgaagtcgttgaatccggccgctacatcattctgctcctgggaaaggcactgagcgtcgtttgggatagacacctgtctatctctgtggtgcttaagcaaacataccaggagaaagtgtgtggtctgtgcggcaatttcgacggcatccaaaacaacgatttgacctcttcaaatttgcaggtggaagaggacccagttgatttcggcaacagctggaaagtaagtagtcagtgtgccgacacccgcaaagttcccctcgactcttcccctgcaacatgccacaacaatatcatgaaacagaccatggtggactcatcttgcagaattctcacttctgacgtgttccaggattgcaataaactggttgaccccgagccctacctcgatgtatgcatctacgatacttgttcctgcgaatccatcggcgattgtgcatgcttctgcgacacaatcgccgcctatgcccacgtctgcgcacagcacggcaaggttgtgacatggaggaccgccactctctgccctcagtcctgcgaagaacgcaacttgcgcgagaacggttacgaatgcgaatggaggtataactcatgtgcgcccgcgtgtcaagtcacatgccagcaccccgagcctttggcgtgccctgtgcaatgtgtcgagggctgccacgctcattgcccgcccggcaagatcctcgacgagttgctgcagacatgcgtcgacccggaggattgccctgtgtgcgaggtagccggtagaagatttgcttctggtaagaaggtcactctgaacccatcagaccctgaacactgtcagatctgccactgcgacgttgtgaacctgacctgtgaggcatgccaagaaccaggaggccttgtagtcccgcctaccgatgcaccagtatctcctaccacgctttacgtggaggatataagcgagccaccactccatgacttctactgcagcagacttctggacttggtattcctcctggacggaagttctaggctgagcgaggcagagtttgaggtcttgaaggctttcgtggttgatatgatggagaggcttaggatctcacaaaaatgggtccgcgtggctgtggtggaataccatgatggcagccacgcctacattggactgaaagaccgcaaaagaccatccgagcttaggaggattgcctcccaagtcaaatacgccggatcccaggtagcatcaacgtccgaagtgctgaagtacaccctgttccagatcttcagcaaaatcgatagaccggaagcgtctcgcatcaccctccttttgatggcctctcaggagcctcagcgcatgagcagaaatttcgtcagatacgtgcagggactgaagaagaaaaaggtgatcgtgattcccgtgggaattggaccgcacgctaacctgaaacagattaggctgatcgagaagcaggctccagagaataaagccttcgtgttgtcttctgtggacgaacttgagcaacaacgcgacgaaattgtgtcatacctgtgcgatctggctcctgaggcaccaccacctactttgcctcccgacatggcacaagtgacagtgggccctggactgctcggcgtttcaaccctgggcccaaagcgcaatagtatggttctggacgtggctttcgttctcgagggctctgataagataggtgaggcagatttcaataggtctaaggaattcatggaagaggtgatccagaggatggacgtcggccaggacagcattcatgtcaccgtgctgcaatactcctacatggtgacagtcgagtaccccttttccgaggctcagagcaagggcgatatcctgcaacgcgtgagagagatcagataccaaggtggcaacagaaccaatacgggactggctctgcgctacttgtccgatcattccttcttggtgtcccagggagacagagagcaggctcctaatctcgtgtatatggtcactggcaatccagcctcagacgaaataaaacgcttgccaggtgatatccaagtggttccaatcggtgtgggtcctaacgctaacgttcaggaactcgagagaatcggttggccgaacgcgcccatcctcattcaggatttcgagactctccccagagaagcccccgacctcgtattgcagcgctgctgcagtggcgaaggactgcaaatccccactctgagtccagctcccgactgcagccagccgttggatgtaattcttttgctggacggtagtagctctttcccagcctcctactttgatgagatgaaatccttcgccaaggcgttcatttccaaggctaacatcggaccaaggttgacacaggttagcgtactgcaatatggttcaataactacgattgatgtcccatggaatgtcgtccccgagaaagcacacctgctgagccttgtggatgtcatgcagagggaaggaggccctagtcaaattggcgacgcactcggcttcgctgtgcgctatctgacctccgagatgcatggtgctcgccccggcgcaagtaaagcggtcgtgatcctggtcactgatgtttccgttgactctgtcgacgccgctgctgatgctgcccgcagtaaccgcgttacagtgtttcccatcggtattggagaccgctacgacgcagcccagctgaggatcctggctggtccagctggagatagcaatgttgttaagctgcagcgcatcgaggatctgccgaccatggtaactctgggaaactctttcctccacaagctttgttccggattcgtaagaatttgcatggacgaggatggaaacgagaagaggccgggtgacgtgtggacactgccagatcagtgtcacacggtcacttgtcagccagacggacaaactctgctgaagtcccacagagtgaactgcgaccgcggattgcgcccttcttgccccaactctcaaagccctgtgaaagtagaggagacttgcggatgtcgctggacctgcccttgtgtgtgcacgggcagttctacccgccacatagtcacctttgatggtcaaaattttaaacttactggtagctgttcatacgttttgttccagaacaaagagcaggacctcgaggtgatattgcataatggagcttgctcacctggtgcaaggcaaggatgcatgaagagtatcgaggtgaaacactctgcattgagcgttgagttgcacagcgacatggaagtcacagtgaacggacgcctggtgtccgtgccgtatgttggcggtaacatggaagtgaatgtgtatggcgccatcatgcacgaggtccgctttaaccacctcggacatattttcaccttcaccccccagaacaacgagttccaattgcagttgtccccaaagaccttcgcctccaagacttacggcctctgcggtatctgcgacgaaaatggcgccaacgacttcatgcttagggatggaacagttaccactgactggaagactctggtccaggaatggacggtccagaggcctggacaaacctgccaacccattcttgaagagcaatgtctggtgcctgattcctctcactgccaagtgctgctgctgccactgtttgcggagtgccataaagttctggcgcctgcgaccttttacgccatttgtcaacaagacagctgccaccaagaacaggtgtgcgaagtgattgctagttacgctcatttgtgcagaactaacggagtctgcgtcgattggaggacgccagacttttgcgccatgtcctgccccccgtcactcgtgtataaccactgcgagcacggttgccctcgccactgcgacggaaatgtctcctcctgcggtgaccacccttccgagggatgcttttgcccacctgacaaggtgatgctcgaaggttcttgtgttccagaggaagcttgtacacagtgcataggtgaggatggtgttcagcaccaatttctggaagcatgggtgcccgaccatcaaccttgccaaatttgtacttgtttgtctggaaggaaggtaaattgcaccactcagccatgcccgactgcgaaggctcctacatgtggcctctgcgaagttgctcgcttgaggcaaaacgctgaccagtgctgcccagagtacgagtgtgtttgtgatccagtaagctgcgacttgcctcccgtcccgcattgcgagagaggcctgcagcctaccctgacaaatcccggcgagtgccgcccgaatttcacttgcgcttgcaggaaagaggaatgcaagcgcgtctccccaccaagctgcccaccacacagactgccgactctcaggaaaacccagtgttgtgacgagtatgaatgcgcttgtaactgtgtgaacagcacagtttcatgtccccttggttacctggcctcaaccgctaccaacgactgcggatgtactacgacaacatgcctcccggataaagtgtgtgtgcaccgctctactatatatcccgtgggacagttttgggaggagggctgtgacgtgtgtacttgtactgacatggaagatgcggtcatgggcctcagagtcgcacagtgctcccaaaaaccgtgcgaagactcttgcaggagtggctttacatacgtcttgcacgaaggcgagtgctgcggtcgctgccttccctccgcatgcgaagtcgtgaccggctcacccaggggcgactctcagtcaagctggaagtcagtcggctcccaatgggcgagtcctgagaatccatgcctgatcaacgagtgcgttagggtgaaggaagaggtgtttatccaacagaggaacgtctcctgcccgcagttggaggtccccgtctgcccaagcggattccagttgtcatgtaagacaagcgcatgctgcccctcttgtaggtgcgagaggatggaggcctgcatgctcaacggtacggtgatcggtccaggcaagaccgtcatgatcgacgtgtgcaccacatgcaggtgtatggttcaggtgggcgtgatctctggtttcaagcttgagtgtaggaagaccacatgcaatccttgtcctttgggttataaagaggagaataatacgggcgaatgctgcggaaggtgcctgcccacggcctgtacaatccagctcaggggcggccagatcatgacactgaagcgcgacgaaaccctccaagacggatgcgatactcacttctgtaaggtgaacgaaagaggtgagtatttttgggaaaaacgcgtgaccggttgtccaccgttcgacgagcacaagtgtttggccgaaggtggtaaaataatgaagattcctggtacctgctgcgacacatgcgaggaacccgagtgtaacgacatcacagccagacttcaatacgtgaaggtgggctcttgcaagtccgaagtggaagtcgacatccactactgtcagggtaagtgtgcttccaaggctatgtattccatcgacatcaacgacgtccaggaccaatgttcctgttgctcccctacccgcacggaacctatgcaggttgcactgcactgcacaaacggaagcgttgtttatcacgaggtcctgaatgcgatggaatgtaagtgctctccaaggaagtgtagcaaa

SEQ ID NO: 21340 - DNA, 8439 bp, synthetic construct
  misc_feature 1..8439: note = source = /note="Description of Artificial Sequence: Synthetic coding sequence"
  source 1..8439: mol_type = other DNA
atgattccagctagattcgccggtgtcctcctggccctcgctctgatcctacccgggacgctctgcgctgaggggacacgggggcggtcatccacagctcggtgtagtctgttcggttcagacttcgtcaatacattcgacggctccatgtacagtttcgctggctactgttcttatctgctcgccgggggctgtcagaaacggagctttagcattattggggacttccagaacgggaagcgagttagtctttctgtgtaccttggtgaattcttcgacatacaccttttcgtgaacggcacagtgacacagggggaccagcgggtgtctatgccctatgcttcaaaaggcctgtatttggaaactgaagccggttactacaaactttccggggaggcttacggctttgttgccaggatagacgggagcggcaacttccaggtactcttgagcgatcggtacttcaataagacttgcgggctctgtggcaacttcaacatcttcgctgaagacgactttatgacccaagagggcactctaacgagtgatccatacgacttcgctaatagttgggcactgtcctcaggcgagcagtggtgcgagcgggctagtccgccaagtagctcttgcaatattagttctggggagatgcaaaaggggttatgggaacagtgtcagctgttgaaatccacatccgtgtttgccaggtgccatcccctggttgatccagagccatttgtcgctctgtgcgagaaaacgctatgcgagtgcgccggaggccttgagtgcgcctgccccgccttgctggagtacgctaggacttgtgcccaagagggcatggttctgtacggctggactgaccattctgcctgctctcctgtctgtccggccggcatggaatatcgccagtgcgtatcaccgtgtgctaggacctgtcagtcccttcacatcaacgagatgtgtcaagaaagatgtgtggatggttgttcctgccctgaggggcaattgttggacgaaggactgtgcgtcgaatcaacagaatgcccatgcgtccactccggaaagcgctaccccccaggcacatccttaagtcgagattgcaatacgtgtatctgtaggaatagtcaatggatatgcagcaatgaagaatgtccaggtgaatgccttgtgactgggcagagccactttaaaagtttcgacaatcgctatttcacattctctgggatctgccagtatctcttagcacgcgattgtcaggaccatagcttcagcatagttatcgagacagtgcaatgcgccgacgaccgagatgctgtctgtaccagatctgtcacggtaaggctgcctggacttcacaattctttggttaaactcaaacacggcgctggggttgccatggacggtcaggacgtacagctacccctgcttaagggggatcttcgaatacaacacacggtgaccgcttcagtgcgcttgagctacggggaggatctgcagatggattgggatggaagaggccgccttcttgtaaagctgtcaccagtgtacgcgggtaagacttgcgggctttgtggcaattataacggtaatcagggagacgactttctcactccttccggcttggccgaaccacgtgtcgaggattttggaaacgcttggaagctgcacggtgattgccaagacttgcagaagcagcactctgatccctgcgcgctgaatccccgaatgacccgttttagtgaggaggcctgtgctgttctgacttcaccaacctttgaagcctgccaccgcgctgtatctccattgccttacctgaggaactgcagatacgatgtttgctcatgtagcgacggtagggaatgcctgtgtggcgccctggccagttatgcagccgcttgtgcaggccgtggagttagggtggcctggcgagagcctgggcggtgtgagcttaattgtccaaaaggccaggtttatctgcagtgtgggacaccttgcaacctgacatgccgcagtctgagctatccagatgaggagtgcaacgaggcctgcttggaaggttgtttttgtcctccagggctgtacatggacgaacggggggattgtgtccctaaggcccaatgcccctgctattacgacggcgaaatctttcagccagaggatatcttcagtgaccaccataccatgtgctattgcgaggacgggtttatgcactgcaccatgagtggggtgccaggatccttgctccctgacgctgttctatccagcccactttcacataggtcaaagagatccctaagttgtagaccaccgatggtgaaactggtgtgccccgccgacaacctgagagctgagggactggagtgcacaaaaacgtgtcagaactacgacttagagtgtatgtctatgggatgtgtcagcggatgcctctgccctccaggaatggttcgccacgaaaatcgatgtgtggctcttgaacggtgtccgtgcttccaccaaggaaaagagtatgcgcccggcgaaaccgtgaagataggctgcaacacttgcgtgtgccaggaccgcaagtggaattgcactgatcacgtgtgtgacgctacctgttcaactattgggatggcgcactacctgactttcgacgggttgaaatacttattccccggggagtgccagtatgtgcttgtacaggactattgcggttccaaccctgggacctttaggatcctggtcgggaacaagggctgtagtcacccctccgtcaaatgtaagaaacgcgttactatactggtggaaggtggggaaattgagctgttcgacggggaggtgaatgttaagcggcccatgaaggacgagactcactttgaggtggttgagagcggccgctacattatcctgcttctcggcaaggctctgtccgtggtgtgggaccgacacctgagcatctctgtggtgctaaaacagacataccaggaaaaagtgtgtggactgtgcggcaactttgacggaatccaaaataacgacctgacgtcatccaatctccaggttgaggaagatcccgtagatttcgggaactcttggaaggtttcctcccagtgcgccgatactcgcaaagtccctctcgatagttcccccgctacatgccataacaacattatgaagcagacaatggtagactcatcttgtcggatcttgacctcagacgtgttccaggactgcaataaacttgtggatccagagccctatctggacgtgtgcatttacgatacgtgctcctgtgagtctattggcgactgtgcctgcttctgtgacaccatcgctgcttacgctcacgtttgtgcccagcatggcaaggttgtaacttggcgcactgccactctatgccctcaatcatgcgaggaacgcaacctgcgggagaacggttatgagtgtgaatggagatacaattcctgcgcccctgcctgtcaagttacatgccagcatcctgaacccctggcatgtccagtccaatgcgttgaaggatgccacgcgcactgtccacctggcaaaatactcgacgaactcctccaaacttgcgttgatcctgaagattgcccagtgtgtgaggtcgcaggacgaagatttgcgtcaggtaagaaagtcaccctgaatcccagtgatcctgagcactgccagatttgccactgcgacgtcgtgaacctgacatgcgaagcttgtcaggagcccggggggctggtagttcctcctacagacgcaccagtgtcccctactaccttgtacgtggaagacatttccgagccacccctccatgatttctactgttccaggctccttgatctagtgtttctattggacgggtctagccgactctcggaagctgaattcgaagtgctgaaggcatttgttgtagatatgatggagcgattacgcatcagccagaagtgggtccgggtggcagtggtggagtaccacgacggctcccacgcttacataggcttgaaggaccggaagcgcccctcagagttacgccggatcgccagccaagttaagtacgctggctctcaagtagccagtactagcgaagtgctaaagtacacactatttcagattttttcaaaaatcgataggcccgaagctagtcggatcacactcttgttaatggcctcccaggagccccagaggatgtctcggaatttcgtgagatacgtgcagggactaaaaaagaaaaaggttatcgtgatacccgtcgggattggcccacacgcaaacctgaagcagatacgcttaatagagaagcaggcccccgagaataaggccttcgtgttaagttcagtggacgaactggaacagcagagggacgagattgtctcctacttatgcgatttggcgcccgaggcacctccacctacccttcctcccgatatggcccaggtgaccgtggggcccggactcctgggcgtgagcacactgggcccaaaaaggaacagtatggtcctcgatgtggccttcgttttggaaggcagcgacaagatcggcgaggccgactttaataggtccaaggagttcatggaggaggtgatccagaggatggatgtcggacaggattccattcacgtcaccgtcttgcagtacagttatatggtgacagtggaataccctttcagtgaggctcagagtaagggggatattctgcaacgcgtgcgggagatcagataccaggggggcaatcgcacgaatacgggcctggcccttcggtacctgtcggaccactcatttttggtttcccagggcgatcgcgaacaagcccccaacctagtttatatggtcactggtaacccagccagcgatgaaataaaaaggctccctggggatatccaagttgtgccaataggtgttggcccgaacgcaaatgtccaggagctggagaggatcggctggccgaacgcgccgatcctgatacaggactttgaaaccctaccccgtgaggcccctgacttggtgttacaaagatgctgtagcggtgaagggctgcaaattcctacgctgtctcctgcacctgattgttcacagcccctcgatgttatcttgctgctggacggctcctcctctttccccgcttcctattttgacgagatgaagtctttcgccaaggcctttatctctaaggccaatattggcccgcgcctgacacaggtgagcgttctccagtacggctcaataactaccatagacgtgccttggaatgtggtgcccgaaaaggctcaccttctctccctggtggatgtcatgcaaagagaagggggtcctagccagataggggacgctctgggattcgcagtccgatacctgacaagcgagatgcacggcgctcgacccggagcctctaaggcagtagttattctcgttacggacgtatcagtggatagcgttgacgccgccgcggatgccgcaagaagcaaccgggttaccgtcttcccaatcggaatcggggatcgttacgacgccgcgcagcttcggattctggccggtcctgccggagacagtaacgtagtcaaactccagaggatagaggatttgcccaccatggtgaccctcggtaactcttttctacataagttatgttcaggatttgtgaggatctgtatggatgaggacggtaacgagaaacggcctggggatgtgtggaccctgccagaccagtgccataccgtgacctgtcagccagatggccagaccttgcttaaatcacaccgggtcaactgtgaccgaggactgaggccaagttgtccgaacagccagtctccggtgaaggtggaggagacgtgcggctgcaggtggacgtgtccctgtgtgtgtaccgggtcttcaaccaggcatattgttacgtttgacgggcagaactttaagctgaccgggtcatgtagttatgtcctgtttcaaaacaaggaacaagacctcgaagtaatccttcacaacggtgcatgcagccccggcgccaggcaggggtgcatgaaaagtatcgaggtcaaacactccgcattgtcagtagagctccacagtgacatggaagtgaccgtgaacggccgtttggtgtccgttccctacgtcggaggcaacatggaggttaatgtctacggtgccatcatgcacgaagtccggttcaaccacctggggcatatttttacatttacacctcagaacaacgagttccagctccaactaagtcccaagacgtttgcgagtaaaacatatggactttgtggaatctgcgatgaaaatggggcgaacgacttcatgctccgagacgggacagttactaccgactggaagactctggtgcaagaatggactgttcaacgacctggacagacttgtcagcctatcctagaggagcagtgtctggtacctgactcctctcactgccaggtgctcctgcttcccttgtttgctgagtgccacaaggtgttggcaccggccactttttatgcaatctgccaacaagatagctgccatcaggagcaggtatgcgaggttatcgcttcttatgcacatttatgccgaactaacggtgtgtgtgtggattggagaactccggacttctgtgcaatgtcttgtccccccagcctggtgtacaatcattgcgagcacggatgcccccgccactgtgatggaaacgtcagtagctgcggcgatcacccaagcgaggggtgtttctgcccacccgataaggttatgctagagggtagctgtgtgccggaggaagcatgtacccaatgcattggcgaggacggcgtccaacatcagtttctcgaggcctgggtgccggatcaccaaccgtgtcagatttgcacgtgcctttcagggcggaaggtgaattgcactacgcagccctgccccacagctaaggccccaacttgcggcctgtgcgaggttgccagattgcgacagaatgccgatcaatgctgccctgaatacgagtgtgtctgcgatcctgtatcttgcgatctgccgccagtaccacattgtgagagaggattgcaacccaccttgacaaaccctggcgagtgccgtccaaattttacctgcgcttgccgaaaggaggaatgtaagcgggtgtccccgccaagctgtcccccccatcgcctgcctactttacgaaagacccaatgttgcgatgagtacgaatgcgcttgcaattgcgtcaactccaccgttagctgtccactaggttacctcgcctctaccgctaccaacgactgcggatgcacaaccactacatgcctacccgacaaagtttgcgtgcacaggtccactatttatccggtgggacagttctgggaagaagggtgtgatgtgtgcacttgtacagacatggaagatgccgtgatgggcctccgggtggcccaatgcagccagaaaccatgtgaggatagctgtaggtccggtttcacgtatgtcttgcacgaaggtgagtgttgtgggagatgtctgccgtccgcttgtgaggtcgttaccggcagccctcgtggtgatagccagtccagttggaagtccgtggggtcccaatgggcctccccagaaaacccatgtctaatcaacgagtgtgtcagggtgaaggaggaggtgttcatacagcagcgtaatgtctcctgtcctcagctcgaggtgcccgtttgccccagtggctttcagctctcctgcaagacctcagcctgctgtcccagctgccgctgcgaacgcatggaggcctgcatgttgaatggtacggtgatcggtccaggtaagactgtgatgatagatgtgtgtactacctgccgatgtatggtgcaggtgggagttatcagtggttttaagcttgagtgccggaagaccacatgtaacccctgccctctgggttacaaggaggaaaataacactggcgagtgctgtggccgatgcctgcctacggcgtgcactatccagttacgcgggggccagatcatgactcttaaacgcgatgagactctgcaggatggctgtgatactcatttctgcaaggtgaatgaacgcggcgaatacttctgggagaagcgggttacagggtgtccaccattcgacgagcataagtgtctggccgagggcggcaaaatcatgaaaattcctggaacctgctgcgacacatgtgaagaaccagaatgtaacgacatcaccgcgcggctgcagtatgtgaaagtcggaagctgtaaatccgaggtcgaggtcgacattcattactgccagggcaagtgtgctagcaaagcaatgtatagcatcgacatcaatgatgtgcaggaccaatgttcatgctgcagcccgaccagaacagagccgatgcaagttgcattgcactgtaccaacggctctgtagtgtaccacgaggttctgaacgccatggagtgtaagtgctccccacgcaagtgttcaaaa

SEQ ID NO: 21341 - DNA, 8439 bp, synthetic construct
  misc_feature 1..8439: note = source = /note="Description of Artificial Sequence: Synthetic coding sequence"
  source 1..8439: mol_type = other DNA
atgatcccagcaagatttgcaggcgtgctccttgctcttgcacttatcttgccaggaactctctgtgcagaaggtactaggggtcggagttcgaccgcacgttgctccctgtttggatccgactttgtgaacacctttgatggatctatgtactcgttcgcgggatactgttcgtatcttcttgcaggaggatgtcagaagcggagcttttccattatcggtgatttccagaatggaaaaagggtgagcctctcggtctacttgggcgagttttttgacattcatctgttcgtgaacgggaccgtcacccagggggatcagcgggtgagcatgccttacgcgagcaagggactgtatctggagactgaagcaggctactacaagctgagcggtgaggcttatggatttgtggcaagaatagatggatcaggaaatttccaggtgctgctttccgaccgctactttaacaagacctgcggcctctgcggcaatttcaatatctttgcggaggacgactttatgacccaggaaggaaccctcacgtcggacccttacgatttcgcaaacagttgggccctttcgtccggggagcagtggtgcgaacgcgcatcgccaccatcttcgtcgtgtaacatttcgtctggtgaaatgcaaaagggactctgggagcagtgtcaattgctgaagtcaacttcggtgttcgcccgatgccatccgcttgttgatcctgagccctttgtggcactctgtgaaaagactctgtgtgaatgcgctggcggcctcgaatgtgcgtgccctgcacttctggaatatgcacggacctgcgcccaagaggggatggttctgtatggttggacggaccatagcgcctgttcgcccgtgtgtcctgcgggaatggaatatcgccaatgtgtgtcaccgtgcgcccggacctgtcaatcgttgcatatcaacgaaatgtgtcaagagagatgcgtggatggttgttcctgcccggaagggcaactgctcgacgaggggctttgcgtggaatccactgaatgtccgtgtgttcactccggaaagagatacccaccgggaacctcactctcaagagattgtaacacttgtatctgcagaaacagccaatggatctgttcaaatgaagaatgcccgggagaatgtcttgtgactggtcagagccacttcaagtcctttgataatagatacttcaccttttcgggcatttgtcaatacctgctggccagggactgccaagatcattcatttagcatagtcatcgaaactgtgcaatgcgcagatgaccgcgatgctgtgtgcactaggagcgttaccgtgcggcttccaggactgcataattcgctcgtgaaactcaagcatggggcaggcgtggcaatggatggacaagatgtgcagcttccacttctgaagggtgatctgagaatccaacacactgtgacggcttccgtgcgcctttcgtacggtgaggaccttcagatggattgggacggaagagggagactgcttgtgaagctgtccccggtctacgcaggaaagacctgtggactgtgcggaaactacaacggaaatcagggagacgactttttgacgccctcaggtcttgccgagccgagagtggaagatttcgggaacgcttggaaacttcacggtgattgtcaagatctgcaaaagcagcatagcgacccatgtgcactgaatcctcgcatgactaggttttccgaggaggcatgtgcagtcctgacttctcccacctttgaagcatgccaccgcgccgtgtcacctctcccttacctgcgaaactgtcgatatgacgtgtgttcatgttcagatggccgggagtgcctgtgcggagcacttgccagctacgctgcagcttgtgccgggcgcggtgtgagggtggcatggcgggagccaggcaggtgtgaactcaactgtccgaagggacaagtctaccttcagtgtggcacgccctgtaacctgacttgtcggtcactgtcgtacccagatgaagaatgtaatgaagcctgtctggaggggtgcttttgtcctcctggactgtacatggatgagcggggagattgtgtgcctaaggcacagtgcccctgttactacgacggtgaaatcttccagccagaggacattttcagcgaccatcatactatgtgctactgcgaagatggatttatgcactgcaccatgagcggcgtccccgggagcctccttcctgatgctgtcctgtcgtcgccacttagccaccgtagcaaaagaagcctgtcatgccggcctccaatggtgaagctggtgtgtccagccgacaacctccgggcagaggggctggagtgtaccaagacctgccagaactacgatcttgagtgtatgtcgatgggctgcgtgtcgggttgtctgtgccctccaggaatggtgagacatgaaaatagatgtgtcgcactggagcggtgtccatgttttcatcaggggaaagagtacgcccccggtgaaaccgtgaagatcggatgcaacacttgcgtttgtcaggacagaaaatggaactgcactgatcacgtctgcgatgcaacgtgtagcactatcggtatggcacactaccttacctttgatggtcttaagtacctgtttccaggtgaatgtcagtacgtccttgtgcaagactactgtgggtcaaatcctggtacctttaggattctcgtggggaacaaaggatgcagccatccgtccgtcaagtgtaagaagcgtgtcaccattctggtggagggtggagaaattgaactcttcgatggcgaagtgaacgttaagcgcccaatgaaggatgaaacccattttgaggtggtcgaaagtggacgctacattatcttgcttctgggaaaagcgttgtcagtggtgtgggatagacatctgtcaatatcggtggtgcttaagcaaacctaccaggaaaaggtctgcggattgtgtgggaactttgatggaattcagaacaatgatctgactagttcgaatcttcaagtggaagaggaccctgtggattttgggaacagctggaaggtgagctcccagtgtgcggatacccgaaaggtgccacttgattcgtccccagcaacttgtcacaataacattatgaagcaaaccatggtggattcaagctgtagaattttgacctccgatgtgtttcaagattgtaacaaactggtagatcctgaaccataccttgatgtctgcatctacgacacctgtagctgcgaatcgattggtgattgtgcatgtttctgtgacacgattgctgcatacgcacatgtctgcgcccaacatggaaaagtggttacttggcgaaccgcgacgctgtgtcctcagtcctgcgaagaaagaaatctccgtgaaaatggctacgaatgtgagtggagatacaactcgtgtgcacctgcgtgtcaggtgacgtgtcagcatcctgaacctcttgcctgcccagtgcagtgcgtcgagggttgccatgcccactgcccacctggtaagatactggatgaactgctccaaacttgcgtggacccagaagattgccctgtctgcgaggtcgcaggccggaggtttgcgtccggaaaaaaggtgactctgaaccctagcgatccagaacattgccaaatatgccactgcgatgtggtcaacttgacctgtgaggcatgccaagagcctggaggactggtcgtgccaccaaccgatgcgccggtgtcccctaccaccctctatgtggaggacattagcgaaccaccactgcatgacttttactgttctcggctgcttgacctggtctttctcctggacggatcatcgcggctgtccgaagccgaattcgaagtcctcaaggcttttgtcgtggacatgatggaacgcttgaggatttcacaaaaatgggttcgtgtcgcagtggtggaataccacgatgggtcacacgcatacattggactcaaggatcggaagcgaccttcggagctccgcaggattgcctcgcaagtcaagtacgccggatctcaagtcgcatcaacttccgaggttcttaagtataccctgtttcaaatcttctccaagattgatcgaccagaggcatcacggattactctcctcctgatggcgtcccaggagccacaacggatgtcacgaaactttgtcagatacgtgcaaggccttaagaagaagaaggtgatcgtcatccctgtaggaataggacctcatgcaaatctcaaacaaattcgacttattgaaaaacaagcgcctgagaacaaggcattcgtgctgtccagcgtggatgaactggagcagcaaagagacgagattgtgtcgtacctctgtgacttggcccctgaagcaccacccccaactcttccacctgacatggcccaagtgaccgttggaccgggacttctcggtgtgtcgactctgggaccaaaacggaactcaatggtgctggatgtcgcgttcgttctggaaggctccgacaagatcggagaggcggatttcaacaggtcaaaggagtttatggaagaggtgattcagagaatggatgtcggacaagactcaatccatgttactgtgcttcagtactcgtacatggtgaccgtcgaatacccgttttccgaagcacaatccaagggagatattctgcagcgagtcagagagatccgttaccagggaggtaatcggaccaatactgggcttgcactccggtacctgtccgatcattcctttcttgtcagccaaggagatagagaacaggcacccaacctggtctacatggtcaccggtaaccctgccagcgatgaaatcaaacgactcccaggagacatccaagtggtgccaattggtgtgggacctaacgccaacgtccaagaacttgaacgaataggttggccaaacgctccaattctgatccaagattttgaaaccctgcctcgggaggcacccgatctggtgctgcagagatgctgttccggagagggacttcagatcccgaccctttcccctgccccggactgttcccaacccctcgacgtgattctgctgctcgatggatcatcgtcatttcctgcaagctactttgacgaaatgaaatcgtttgcgaaagcgttcatctccaaagccaatattggtccgcgtctcacccaggtgtctgtgctccaatacggaagcattaccaccatcgacgtcccttggaatgtggtcccggagaaggcacatcttctctcattggtggatgtcatgcaacgtgaaggaggtccttcgcaaataggggacgcactgggattcgcagttaggtacctgaccagcgaaatgcatggagcacgtcccggagcatcaaaggcggtcgtcattctggtgactgacgtgtccgtggattccgtggacgcagccgcagacgctgcgagatcgaaccgggtgaccgtgtttccaattggtataggagacagatatgatgcggcacagctccgcattctggctgggcctgccggagatagcaacgtggtgaaactccagcgaatcgaagatctgccaaccatggtaactttggggaactcattcctgcataagctctgctcggggttcgtcagaatttgcatggatgaagatggtaacgaaaagcgtcctggagatgtgtggactctgccagaccaatgtcataccgtgacgtgtcaacccgatgggcaaactcttctgaagtcacatagagtgaattgtgacagaggtcttagaccttcatgtcccaacagccagtcgcccgtgaaagtggaagaaacctgtggatgccggtggacttgtccctgtgtgtgtactggaagcagcacgagacatatcgtgactttcgatgggcagaactttaagctcactggctcgtgttcgtacgtgctgttccagaataaagagcaagacttggaagtcattctgcacaacggagcatgttcccccggcgcgagacaaggttgcatgaagagcattgaggttaagcattcagcactgtcggtggaacttcactccgatatggaagtgacggtgaacggtcgccttgtgtcagttccatacgtgggaggaaacatggaggtgaatgtttacggcgcgatcatgcatgaagtcaggttcaaccatctcggacatatcttcaccttcaccccccagaacaatgaatttcagcttcagcttagccctaagacttttgcaagcaagacttacggactgtgtggtatatgtgatgaaaacggagctaacgactttatgcttcgcgatggcaccgtgaccacggattggaaaacgctggtgcaagaatggaccgtgcagcgcccaggtcaaacctgccaacccatacttgaagaacaatgtctcgtccctgatagcagccattgtcaagtgctccttcttcctctttttgcagaatgccataaagtgctggccccagccaccttctacgcaatttgccagcaagattcgtgtcatcaggaacaagtgtgtgaggtgattgcatcctacgcgcatctttgtagaaccaatggtgtgtgcgtagattggcggactcccgatttctgtgcaatgtcatgtccgccatcgctcgtgtacaatcattgtgaacatggttgtcctcggcattgcgatggtaacgtcagctcatgtggtgatcacccgtcagaaggctgtttctgtcctccggataaagtcatgcttgaaggatcctgtgtgcccgaagaagcgtgcacccaatgcatcggagaggacggagtacagcaccaatttctggaggcatgggtgccagaccaccagccatgtcagatctgtacctgcttgtctggtcgtaaagtcaattgtactacccaaccgtgtccaactgcgaaggcgcctacgtgtggcctgtgcgaagtggctaggcttaggcaaaatgccgaccaatgttgtcctgagtatgagtgtgtgtgcgatccagtgtcctgtgatctgcctccagttccgcactgtgagagagggcttcagcccacgttgaccaaccctggagaatgccggccgaactttacctgcgcttgccggaaggaagaatgcaagcgagtgtcacccccaagctgccccccgcacaggctgcccactttgcgcaagacccaatgctgtgatgagtacgaatgtgcatgtaattgcgtgaactccactgtcagctgtcctctgggttacctcgccagcaccgcaacgaacgactgtggctgcaccactaccacttgtttgccagacaaagtgtgcgtccaccgatccacgatttacccagtgggccaattctgggaggagggttgtgatgtatgtacttgtactgatatggaggacgcagtcatgggtctgcgtgtggcacaatgtagccaaaaaccatgtgaggattcgtgccgctcaggtttcacttacgtgctgcatgaaggcgaatgttgcggtcgctgccttccttcagcgtgtgaagtggtcacgggatccccaaggggagactcacagtcctcctggaagagcgtgggctcccaatgggcatcacccgagaacccatgtctgattaacgaatgtgtgagagtgaaggaagaagtctttatacagcaacggaatgtgtcgtgcccgcagctggaggtgcctgtgtgccctagtggtttccagctctcctgtaaaactagtgcctgttgtccgtcctgcaggtgcgaacgcatggaagcctgtatgctcaatgggactgttattggaccaggcaagaccgtcatgattgatgtgtgcactacttgtaggtgcatggttcaggtaggagtgatcagcgggtttaaacttgaatgtcgaaaaactacctgtaatccctgcccccttggctacaaggaggaaaacaataccggggaatgttgtggccgttgtctgccaactgcctgtactattcagctgcggggcggtcagattatgactctgaaaagagacgaaactctgcaagatggatgcgacacccacttttgtaaagtgaacgagcggggggagtacttctgggagaagagagtgacgggttgtcctccttttgatgaacacaagtgtcttgcggaaggaggcaagattatgaagattcccgggacttgttgtgatacttgtgaggaaccagaatgcaatgacatcacggcacgactgcaatacgtgaaggtggggtcctgtaaatccgaagttgaggtggacatccactactgtcagggaaagtgtgcttccaaagcgatgtacagcatcgatatcaatgatgtgcaagatcagtgttcgtgttgttcgcctacccgtaccgaacctatgcaggtggccctgcactgcacgaacggttctgtcgtctaccatgaagtcctcaacgcaatggaatgcaagtgtagcccccggaagtgctccaag

SEQ ID NO: 21342 - DNA, 8439 bp, synthetic construct
  misc_feature 1..8439: note = source = /note="Description of Artificial Sequence: Synthetic coding sequence"
  source 1..8439: mol_type = other DNA
atgatcccggcacggttcgcaggagtcctccttgcactggcccttatccttccgggtacgctgtgcgccgaaggtactcgggggagatcctccactgcacgctgttcgttgtttggaagcgatttcgtgaataccttcgatggatcgatgtacagcttcgcaggttactgttcctacctgcttgcaggaggatgccagaagcgttcattttcaatcattggcgactttcaaaacggtaagcgcgtgtcactgtcagtgtacctgggcgagttttttgacattcatctctttgtgaacggaaccgtgacccaaggagatcaaagagtctcgatgccttacgcatccaagggactctacctggaaactgaagcagggtactacaaactttcgggagaagcctatggctttgtggcaagaatcgatggatctgggaactttcaagtgttgctgtcagataggtatttcaacaagacgtgtggtctttgcggaaatttcaacatttttgcagaggatgactttatgacccaggagggtactctgacttccgatccttatgactttgcaaactcgtgggcactgtccagcggagaacaatggtgtgaaagagcgtccccaccctcgtcgtcctgcaacattagctccggcgaaatgcaaaaaggactttgggagcagtgccagctcctgaagtcgaccagcgtctttgcgcgatgtcaccctcttgtggatcccgagccattcgtggcgctttgtgaaaaaactctttgtgagtgcgcaggtggccttgaatgtgcatgtccagctcttctggaatatgcaagaacgtgtgcccaggaaggtatggtcctctacggatggaccgaccattcagcatgttcgcctgtttgcccagcaggcatggagtaccgtcagtgcgtcagcccctgtgcacgaacttgtcagtcgctgcacattaacgaaatgtgtcaggagcggtgtgtggatgggtgttcgtgtcctgaaggtcagctccttgacgaaggactgtgtgtggaaagcaccgagtgtccctgcgtccattcgggtaagcggtatccaccaggtacttccctctcccgggactgcaacacttgcatctgtcgtaactcccagtggatctgtagcaatgaagaatgcccgggggagtgcttggtgaccggacagagccatttcaaatcatttgataatcggtactttacttttagcgggatttgtcaatacctccttgccagggactgccaagaccattccttttcaatcgtgatcgaaactgtccaatgcgcggatgaccgagacgccgtgtgcaccaggagcgtaactgtgaggctgcccggtttgcacaactcgttggtcaaacttaaacatggcgcaggcgtggcgatggacggacaagatgtgcaactccctctgttgaaaggagacttgagaattcaacatactgtgacggcaagcgtgagactttcctacggagaagatctgcagatggactgggatggacgtggccgactgttggtaaaactgtctcctgtgtacgcaggaaagacttgtggtctttgtggtaactacaatgggaaccagggagatgattttcttacccctagcggtcttgcagaaccacgcgttgaggactttggaaatgcctggaaactccatggcgattgtcaggatctgcaaaagcagcactcggatccttgtgcactgaacccccggatgactaggttttcagaagaggcctgtgcagtcctgaccagcccaacttttgaagcatgccatagagcagtgtcgcctcttccataccttcggaactgccggtacgacgtgtgcagctgctcagacggtagagaatgtctctgtggggccctcgcatcatatgcagcagcgtgtgcaggacgcggggtgagggtggcatggcgtgaaccaggacggtgtgaattgaactgcccaaagggtcaggtgtacctgcaatgtggaaccccatgcaatcttacctgtcggtcgctttcataccctgatgaggagtgtaacgaagcatgcctcgagggttgtttttgtccaccaggcctttacatggatgaaagaggagactgtgtgcccaaggcacaatgtccttgttactacgacggcgagatttttcagccggaggatatcttcagcgatcaccataccatgtgttactgcgaagatggatttatgcattgcactatgtcaggcgtgcccggttccttgttgcccgatgcagtgctttcttcacctctttcgcatcgttcaaagcgatccctcagctgtaggccacccatggtgaagttggtgtgcccggcagataaccttcgcgcagaaggactcgaatgtaccaaaacctgtcagaactacgatcttgaatgtatgtcgatgggatgtgtgtcgggctgcctctgcccacctggaatggtgcgacatgaaaatagatgtgtcgcactggagagatgcccgtgtttccaccaaggcaaggagtacgcgcctggtgagacggtgaaaataggctgtaacacctgcgtgtgtcaagatcgcaaatggaactgtaccgatcatgtgtgtgacgctacttgctccaccatcgggatggcgcattacctcactttcgatggtctgaagtacctgttccctggagagtgccaatacgtactggtgcaagattactgcggttcgaatcccggtacgttcaggatccttgtgggcaacaagggatgctcacaccctagcgtgaagtgtaaaaagcgggtgactatactcgtggaaggcggagagattgagctctttgacggtgaggtgaacgtgaaaagacctatgaaggatgaaacccactttgaggtggtggaatcgggacgctacatcattctgctcctcgggaaagcactgtccgtggtgtgggatagacatctgagcatctcggtcgttctcaaacagacttaccaagagaaggtgtgtggcctctgtggcaattttgatgggattcaaaacaatgatcttacttcgtccaacctgcaggtggaagaggatccagtggattttgggaattcctggaaggtgtcgtcacagtgcgcggacacccgtaaggtgccactggactcgtcgcctgccacctgtcataacaacattatgaaacagaccatggtggactcgtcctgcagaattctgactagcgacgtgttccaagattgcaataagctggtggacccagaaccatacttggatgtgtgtatctacgatacctgctcctgcgaatccattggagattgtgcatgtttctgtgataccattgcagcgtatgcacatgtctgtgcacaacatgggaaggtggtgacttggcggactgcaaccctttgtcctcagtcgtgcgaagaacgcaacctgagagaaaacggatacgaatgcgagtggaggtacaacagctgcgcacccgcatgtcaagtgacttgtcaacaccctgaacctttggcatgtcctgttcagtgcgtcgaaggttgtcatgcacactgtcctcctggaaagattcttgatgaacttctccaaacctgtgtcgatcctgaagattgtcctgtgtgtgaagtcgcaggcagacggtttgccagcggtaagaaggtgaccctgaacccatccgatcctgaacactgtcagatatgtcattgtgatgtggttaacctgacctgcgaggcatgtcaagagccaggtggacttgtcgtccctcccaccgatgcacctgtctcaccgaccactctgtacgtcgaggatatcagcgaacctcctcttcacgacttttactgttcgcgtctgctggatctcgtgttcctgttggatggatccagccgcctttccgaggctgaatttgaagtgcttaaagcgtttgtcgtcgatatgatggaacgattgcgtatttcacaaaagtgggttagagtggccgtggttgaataccacgatggatcacatgcctacatcggcttgaaagaccggaaaagaccctccgaactccgccggattgcgtcacaagtgaagtatgccgggtcccaagtggcctccacttcagaagtcctcaagtacactctgttccagattttctccaagattgatcgtcccgaagcaagcagaataaccctcttgctgatggcgtcacaagagccacaaaggatgagccgaaatttcgtgcgttacgtccagggactcaagaagaagaaggtcattgtgatcccagtcggtatcggaccgcacgcaaacctgaagcagatccgccttattgaaaaacaagcgccggaaaacaaagcatttgtgctgagctcggtcgatgaacttgagcagcagagagacgagatcgtgtcctacctttgcgacttggccccagaagcaccacctcctaccctcccacctgacatggcacaggtgaccgtcggacctggtctgctgggtgtctccacgcttggtcctaaaagaaactcaatggtgcttgacgtggcgttcgtgctcgaagggtcggacaagattggggaagcggatttcaatcgctctaaggagttcatggaagaggtgatacagagaatggacgtgggacaagattcaatacatgtcactgtcctgcaatactcttatatggtgacggttgaataccctttttcagaagctcaatcgaaaggagatattctgcagcgagtgcgagagattcgctaccaggggggaaaccgtaccaatactgggttggcacttagatacttgtccgatcactcgttccttgtgtcacaaggagatcgagagcaagcaccgaacctggtctacatggtgacggggaatccagcatcggatgaaatcaagagactccctggagacatccaagtggtgccgatcggagtgggacctaacgcaaacgtgcaggagctggaacgcattggctggcctaacgcgccgatacttattcaagatttcgaaacccttccccgggaagcgcccgatctggtgctccagcgctgttgctcgggtgaaggactccagattcctactctttctcccgcacccgattgctcacagcctttggatgtgattctccttcttgacggatcctcatcgtttccagcgtcgtacttcgatgagatgaagtcatttgctaaggcattcattagtaaggcaaacattgggcccaggcttactcaggtgtctgtgctgcaatacggaagcatcaccaccatagatgtcccctggaatgtggtcccggaaaaggcccatcttctctcacttgtggatgtcatgcaacgagaagggggtccttcgcagattggagatgcactgggtttcgcagtccgataccttacctcggagatgcatggtgcccgccccggagcatcaaaggcagtcgtgatcttggtcaccgacgtgtccgtggattccgtggacgcagcagccgacgcggcgagatcgaacagggtcaccgtgtttccgattggaattggtgatagatacgacgcagctcagcttagaattctggctggtccagccggcgattcaaatgtcgtgaagctgcaaaggatcgaggacctgcccacgatggtgactctgggtaattcctttctccataagctgtgctcgggttttgtcagaatatgcatggacgaggatggaaatgagaagaggccaggcgatgtgtggactctgcccgaccagtgccacaccgtgacctgccagcctgatggccaaactctcctgaagtcccacagagtgaattgcgatcggggactgcgacccagctgtcctaatagccaatcgcctgtcaaggtcgaggaaacctgtggatgtcggtggacctgtccttgcgtctgtaccggaagcagcacgcggcatatcgtgacgtttgacggacaaaacttcaagttgaccggaagctgttcgtacgtgctgtttcagaataaagaacaagacctcgaggtgatccttcacaacggcgcatgttcacctggggctagacagggctgtatgaagtctatcgaggtcaagcatagtgctctgagcgtcgaactgcattcggatatggaggtgaccgtcaacggtcgccttgtgtccgtcccctacgtgggtgggaacatggaagttaacgtgtacggggcgatcatgcacgaagtccggttcaatcatcttgggcacatattcacgttcactccccaaaacaacgagtttcaactccagctttcccctaagacttttgcttcaaagacctacggcctgtgcggaatatgcgatgaaaacggcgcaaatgactttatgctcagggatggaaccgtcaccaccgactggaaaacgctggtgcaggagtggactgtgcaaagaccgggacaaacttgtcaaccaatccttgaagagcagtgcctcgtgcctgattcgtcgcattgtcaggtgctgttgctgccccttttcgcagaatgtcataaggtgctcgcccctgcaactttttacgcaatctgtcaacaggacagttgccatcaggaacaggtgtgtgaagtgattgcatcctacgcacatctgtgtagaaccaacggagtgtgcgtcgattggcggaccccggacttttgtgccatgtcgtgtcctccgagcctcgtttacaaccattgtgagcatggctgtcctcggcactgtgatggaaacgtgtcctcatgcggggaccatccatcagagggatgtttctgtccaccggacaaagtgatgctggagggatcatgcgtcccggaagaagcgtgtactcagtgtattggcgaggatggtgtccagcatcaatttctggaagcatgggtgccagaccatcagccttgtcaaatttgtacttgcttgtcaggacgcaaggtgaattgcacgactcagccttgtcccaccgcaaaggctccaacttgtggactttgcgaagtggcccggcttagacagaacgcagatcaatgttgccccgaatatgagtgtgtgtgtgacccagtgtcctgtgatcttccccccgtcccccattgtgaaagaggccttcagcctacccttaccaatccaggagaatgccgccccaactttacctgcgcatgtcggaaggaagagtgcaagcgcgtctcgcctccgtcgtgtcccccacataggctcccgactctgcgaaagacccagtgttgcgatgagtacgaatgtgcctgtaactgtgtgaactcaaccgtgagctgtccattgggatatttggcctcgaccgccactaatgactgtggttgtaccaccaccacttgccttccagataaggtctgtgtgcacagatcgactatttacccagtcggacagttctgggaggagggatgtgatgtctgcacttgtaccgatatggaggacgcagttatggggcttagagtcgcacagtgttcgcagaaaccctgtgaggatagctgtcggagcgggtttacttacgtgctccacgaaggggagtgttgcggtagatgccttccatcggcttgtgaagtggtgaccgggtcgccacgaggggactctcagtcgagctggaagagcgtcgggtcgcagtgggcctccccagaaaatccatgtctcattaacgaatgcgtgagggtcaaggaagaagtgtttatccaacagcggaacgtgtcctgtccccagcttgaagtgccagtctgcccttctggattccagttgtcctgtaagacttccgcctgttgcccttcgtgccgttgcgaacgcatggaggcctgtatgctgaatggaaccgtgatcgggccagggaaaactgtgatgattgatgtgtgtaccacttgccggtgtatggtccaagtgggggtcattagcggctttaagttggaatgtcgcaagactacctgcaatccttgtcctctgggatacaaggaggagaacaataccggtgagtgctgtggtcggtgcctgcctactgcatgtactatccaacttaggggaggccagataatgactctcaagcgggatgaaacgcttcaggacggatgtgatactcatttctgtaaggtcaacgagcggggagagtacttttgggaaaagcgggttacgggttgtcctcctttcgatgaacataaatgcttggctgagggtggaaagatcatgaagattcctggaacttgctgtgatacctgtgaagaaccagaatgtaatgatatcacggcacgacttcaatacgtcaaggttggttcctgtaagagcgaggtcgaagtcgacatccattactgtcaggggaagtgtgcaagcaaggcaatgtatagcattgatatcaacgatgtgcaagatcaatgtagctgctgttcaccgacccggacggaacctatgcaggtggcattgcattgtactaacggatccgtggtgtaccatgaggtgctgaacgcaatggagtgtaaatgttcgcctcggaagtgctcgaaa

SEQ ID NO: 21343 - DNA, 8439 bp, synthetic construct
  misc_feature 1..8439: note = source = /note="Description of Artificial Sequence: Synthetic coding sequence"
  source 1..8439: mol_type = other DNA
atgatcccagcccggtttgcgggtgttctgctcgcattggccttgattctacctggcaccctctgtgctgaaggaaccaggggcaggagttctaccgcacgctgtagtctgttcgggtccgattttgtgaacacttttgatggttcaatgtattcctttgcgggttattgctcttatttactggctggggggtgtcagaaacggtcgttttcaatcatcggcgactttcaaaacgggaagagggtgtctctgtcagtctatcttggggagttttttgatatacatctcttcgtgaacggcaccgtgacccagggagaccagagagtgagcatgccatacgcctccaaggggctttaccttgagacagaggctggatattacaaactatctggcgaagcgtacgggtttgtggcaagaatcgatgggtctggaaattttcaagttctgttgtctgatcgctacttcaacaagacctgtggtttgtgtggcaacttcaatatattcgcagaagacgacttcatgactcaggaaggcaccctcaccagcgatccttacgacttcgcaaacagctgggcgttatcgagcggcgaacagtggtgtgagagggcctcaccacctagttcgtcgtgtaacatcagcagtggtgaaatgcaaaaggggctgtgggagcaatgccagctcctgaagtcaacctcagttttcgccaggtgccaccccctagtggacccagagccgttcgtggcactgtgtgagaaaactctgtgtgagtgcgcggggggattggaatgcgcttgcccagcactgttggaatacgcccgaacgtgcgctcaggaggggatggtcctttacgggtggactgatcacagtgcctgctcccccgtgtgtcccgccggaatggagtatcgtcagtgcgtgagtccttgtgcccgaacctgtcagtccctccacatcaacgagatgtgccaggagagatgtgttgatggctgttcatgcccagaaggccaactgctggatgaaggcctttgtgtggaaagcaccgaatgtccttgtgtgcactctggtaaaagataccccccaggaacttctctttccagggattgcaacacatgtatctgcaggaattcacagtggatctgttccaatgaggagtgtcctggagaatgcttggtgactggccagagtcattttaagagctttgacaaccgatacttcacatttagcggaatatgccagtacctattagcgcgggattgtcaggaccactcatttagcatcgtcattgagacagtccagtgcgcagacgaccgggacgcagtttgtaccaggtccgtaaccgtgcgccttcctggattgcataactccctggttaagctaaagcacggggctggggtggcgatggacggacaggatgtgcagctgcctcttctgaagggcgatctgaggattcagcatacagttactgcctctgtccggctatcttatggtgaggaccttcagatggactgggatggccgtgggcgcctgctggtcaaactctctcctgtctacgctggtaagacctgcggcttgtgtgggaactataatggcaatcagggggatgactttctcacgcccagcgggttggctgaaccccgtgtggaagactttgggaacgcgtggaagctgcacggcgactgccaggatttgcagaaacagcactctgacccctgtgctctgaatcccaggatgacccggttttccgaggaagcctgtgccgttctcacttctcccacgttcgaagcttgccatcgggcagtgtcaccactcccatacctgcgcaattgccgctatgatgtgtgttcctgtagcgatggacgagaatgtttgtgcggtgctttagcctcatacgctgccgcatgcgccggcaggggggtgcgggtagcctggcgcgagccgggaaggtgtgagctgaattgtcccaaaggacaggtgtatctacagtgtggaactccgtgcaatctcacttgccgaagtttatcttacccggacgaagaatgtaacgaggcttgcctcgagggatgcttttgccccccaggactgtacatggatgagcgtggagactgcgtgcctaaagctcagtgcccctgttattacgacggagaaatttttcagccagaggatattttcagcgaccatcatacaatgtgctattgtgaagatggctttatgcattgtactatgagcggcgtgcccggctcattattaccggatgctgtgttgagctcacctttgagccacaggagtaaaagaagtctatcctgtcggccccccatggtgaaactggtgtgtccagccgataatctgagggctgagggattggaatgcaccaaaacttgccagaattacgatctggaatgtatgagcatgggatgtgtgagtggttgcctgtgcccccctgggatggtccggcatgaaaatcgctgtgttgccctggaacgttgcccctgtttccaccagggcaaggaatacgccccgggggagacagtgaagataggatgtaatacttgcgtttgccaggacagaaagtggaattgtaccgatcacgtgtgtgacgccacctgctcaacgatcgggatggctcattatttgacatttgacgggcttaagtatcttttcccaggcgaatgtcagtatgttttagttcaggactactgcggttcaaatccgggtacctttcgaatcctcgtgggaaataagggttgtagtcacccctctgtgaaatgcaaaaaacgcgtgaccattctggtagaaggaggggaaatagaattatttgatggagaagtgaacgtcaagagacccatgaaagacgagactcactttgaggtggtcgagtctggccgctacattattctgctgctagggaaggctctctctgtggtgtgggaccggcatctcagcattagtgtcgttctgaagcagacgtatcaagaaaaagtttgtgggctctgcggcaactttgacggcattcagaataacgacctgacctcttctaatctacaggtggaggaggatcccgtagattttggcaattcctggaaagtttcatcacagtgcgccgatacccgcaaggtaccactggactcgagccccgccacatgccacaataatatcatgaagcagacaatggtagactcttcatgccggatccttacctccgatgtgtttcaggattgcaataagttggtggatccggaaccttacctggatgtctgtatttatgatacatgctcgtgcgagagcatcggggattgtgcctgtttttgcgacactatcgcagcatacgcgcatgtttgcgctcagcacggaaaagtggtaacctggaggaccgcgactctgtgcccacagtcttgtgaagagaggaatctaagggagaacggatatgagtgtgagtggcgatataacagctgcgcccccgcctgccaagtgacttgccagcatccggagcccctggcttgtcctgtccagtgtgtggaaggttgccacgcccactgcccaccaggaaaaatcctggatgagctgctacagacctgcgtggacccagaagactgtccagtgtgcgaggtcgctggacggcggtttgcgtccggaaagaaggtgacattgaaccctagcgatcctgagcactgtcagatctgccactgtgatgtggttaacctgacatgcgaagcttgccaggaaccagggggactggtcgtgccccctaccgacgctcccgtgtctcccactaccctctatgtggaggacatatcggagccacctctacacgatttttattgctctcgcctcctggatttggtcttcttgttggatggatcgtcccgacttagcgaggccgaatttgaggtgctaaaggccttcgttgtagatatgatggagaggctgagaatctctcaaaaatgggtgcgggtcgcagtggttgagtaccatgatggctcacacgcttacattggattgaaggacaggaagagaccttccgagctgaggcggattgcatcgcaagtgaaatatgctggttcgcaggtggcttcaacctccgaggtgctgaagtatactctcttccagattttctcaaaaattgatcgaccagaagcttctcggattaccttgctgcttatggctagccaagagcctcaacgaatgtcacgtaacttcgtgaggtatgtccagggactgaagaagaagaaagtaatcgtaattcccgtggggattggtcctcacgcaaatctaaagcagattcggcttatagaaaaacaggctcccgagaataaagcatttgtgctttctagtgtggatgaacttgagcagcaaagggatgaaattgtcagctatctttgtgacctcgccccagaagctcctccaccgaccctgccaccggacatggctcaggtgactgtggggccaggcctgttgggggtttctactctcggccccaagcgtaactctatggttctcgacgtggctttcgtgctagaaggcagcgacaaaatcggtgaggccgacttcaaccgcagcaaggaattcatggaggaagttatccagaggatggacgtgggccaggacagtatccatgtgactgttctccaatacagctacatggtgactgtggagtaccccttctctgaggctcagagcaaaggagatattcttcaacgcgtgagggaaatcagatatcaggggggcaatagaaccaatacaggacttgcgctgagatatctctctgatcacagctttctggtgagccagggcgacagggaacaggccccaaacctagtgtatatggtgactggcaatccagcgtccgacgagattaaacgcctacctggggacatccaggtggtcccaattggtgtgggtcctaatgccaatgtacaagagttggagcgtattggatggcctaatgccccgatcctgattcaagacttcgagactctccctcgcgaagctcccgacctggttttgcagcgctgctgcagtggggaagggttacagattccaactctgtcacctgccccagactgctctcaacctttggacgttattttgttgttggatgggagttctagttttccagctagctattttgacgaaatgaaaagcttcgccaaggcttttatttccaaggcaaatatcgggcctagactgacacaagttagcgttttgcagtatgggagtattaccactatcgacgttccttggaatgttgtccctgaaaaagcccatctgctgagtctagtcgacgtcatgcagagggagggcgggccttcccagattggcgatgcgctgggctttgccgttaggtatctcactagtgaaatgcacggggctagaccaggagcgtccaaggctgtagtgattctcgttacagacgtgagcgttgattcagtggatgcagccgcagacgcagcacgaagtaatcgggttactgtttttccaatcgggataggcgataggtacgatgccgcccagctgcgaatcctcgctgggccagccggagacagcaatgttgtgaaactgcagagaatcgaagacttgcctacaatggtgacgcttggcaactctttccttcacaagctgtgcagcgggtttgtccgaatttgtatggatgaggatgggaacgagaagcgaccgggcgacgtgtggacgttaccagatcagtgtcatacagtgacatgtcagcccgatgggcagacacttctgaagtctcacagagtcaactgcgaccgtggactgcgtccctcgtgtcctaattcccagtctccagttaaagttgaggaaacatgcggatgcaggtggacttgcccatgtgtctgcacagggtcttccacaaggcatattgtcacgttcgatggtcagaatttcaagctgacaggatcttgttcgtacgtgctcttccagaataaggaacaggacctggaggttattctgcacaacggagcttgctcaccaggcgcaaggcagggttgtatgaagtctatcgaggtcaagcactctgcgctaagcgtggaacttcactccgatatggaggttacagtgaatggcagactcgtttccgttccatacgttggaggaaacatggaagtgaacgtgtacggggcgatcatgcatgaggttcggtttaatcacctcgggcatatttttacgtttaccccacagaacaacgagtttcagcttcagttgtctcctaagaccttcgcctctaagacatacggtctgtgtggcatatgcgacgagaacggcgccaatgacttcatgctgagggatgggactgtcacaactgactggaagactctggttcaagagtggaccgtacagcggcctgggcagacgtgccagcccatcctggaggaacaatgcctcgtgccagacagcagccactgtcaggtgcttctgctcccacttttcgctgaatgtcacaaagtgctcgccccggctaccttttacgccatttgtcagcaggatagctgccaccaggagcaagtttgcgaggtcatcgcctcttatgcacatctgtgtagaacaaacggggtgtgcgtggactggcggactcccgacttctgcgccatgtcatgccctccaagcctcgtgtacaaccactgcgagcatggctgtccgcggcactgcgatgggaacgtgtcctcctgtggagatcacccctcagaaggatgtttttgcccaccagataaagtgatgctggaaggatcttgtgtgcctgaagaggcttgcacacagtgcattggagaggacggggtgcagcaccagttcctggaagcttgggtgccagaccaccagccctgccagatatgcacctgcctttcaggccgcaaagtgaattgcaccacccagccctgccccaccgccaaggcgcctacatgtgggctttgcgaggtggccagactgaggcagaacgcggatcagtgttgcccagagtacgagtgcgtatgcgacccggtgtcgtgcgatctgccaccggtcccgcactgtgagaggggcttgcagcccacgttaacgaaccccggagagtgtcgccccaactttacctgtgcctgccggaaggaggagtgcaaaagggtgagcccaccgtcctgtccccctcaccgattacctactcttcgaaagacacagtgttgtgatgagtacgagtgcgcctgcaattgtgttaactcaactgttagctgcccccttggctacctggccagcaccgcaacgaatgactgcgggtgtacgaccacaacctgtctgcccgataaggtgtgtgtacaccggtccacaatttatccagtaggacagttttgggaggaggggtgcgatgtttgcacatgtactgacatggaagatgccgtaatggggctcagggttgcccaatgctcacagaagccttgcgaggattcttgtagaagtggtttcacatatgtcttacacgagggcgaatgttgcggccggtgcttaccgagcgcatgtgaggtcgtcaccggatctccgcgaggggattctcagagtagctggaagagtgtcggctcgcagtgggcctcacccgagaacccttgcctcatcaacgagtgcgtgagagtgaaggaggaggtgtttatacagcagagaaatgtcagctgtcctcaactggaggttccagtttgcccgtcgggctttcagcttagctgtaagacgtccgcctgttgcccgtcctgcaggtgcgagagaatggaggcttgcatgctgaacggtaccgtaatcggccccggcaagaccgttatgatagatgtgtgcacaacctgtcgctgtatggttcaagtgggcgtgatcagcggtttcaaattggagtgccggaaaaccacttgcaacccctgcccactggggtacaaggaggagaacaacaccggagaatgttgtggcaggtgtctccctactgcatgcaccatacagcttcggggggggcaaattatgaccctgaagcgcgacgagacgctgcaagacgggtgtgacacccatttttgcaaagtgaatgagcggggagaatatttctgggagaaaagagttaccgggtgccctccatttgatgaacacaagtgtctggctgaaggaggcaagatcatgaagatccctggcacctgctgcgacacatgcgaagagccggagtgcaacgatataacggcacgcctgcagtatgtgaaagttggcagttgtaaatccgaggtcgaagtggatatacattactgtcaggggaagtgtgcctctaaggccatgtactccatcgacatcaacgatgtccaggatcagtgttcctgttgcagtcctaccagaaccgaaccaatgcaagtagctctacattgcacaaacggctctgtggtctaccatgaggtgttgaatgctatggaatgtaaatgctcaccacgcaagtgctccaaa

SEQ ID NO: 21344 - DNA, 8439 bp, synthetic construct
  misc_feature 1..8439: note = source = /note="Description of Artificial Sequence: Synthetic coding sequence"
  source 1..8439: mol_type = other DNA
atgataccagctaggttcgcaggcgttctgctcgctctggcgcttattcttcccgggactctgtgcgcagaaggaaccaggggtcggagtagcactgcgcgttgctcactctttgggtcagatttcgtcaataccttcgatgggtctatgtactcctttgccggatactgcagctatctcttagccggcggctgtcaaaagcgaagcttttccataattggggactttcagaatggtaaaagggtttcactgagtgtatacctaggcgagttctttgacatacatttgtttgtcaatggcaccgtgacacagggggatcagcgtgtgagtatgccatacgcttctaagggcctctatctggagaccgaggccggctactacaagctgtctggggaagcctatgggtttgtggcccgcatagatgggtccggaaattttcaggttctcctctccgacaggtattttaataagacctgtggactgtgcggaaactttaacatttttgccgaagacgactttatgacccaggaaggaaccctgaccagtgacccttatgacttcgctaattcatgggcactgtcatctggggaacaatggtgcgaaagggcctccccaccttcctcctcgtgtaatatcagctccggcgaaatgcagaaaggcctgtgggagcagtgtcaactactcaagtcgacatctgtatttgctaggtgtcacccgctggtggaccctgaacctttcgtggccttgtgtgaaaaaaccctgtgtgaatgtgcgggtggcttagagtgcgcctgccccgcattgttggagtacgctcggacttgcgcacaggagggcatggtgctgtacgggtggacggatcactctgcatgctccccggtctgccctgcagggatggaatacaggcagtgcgtctccccttgtgcccgcacatgccagagcctgcacattaatgaaatgtgtcaggagaggtgtgtagatggttgtagttgcccagaagggcaactgctggacgaggggctatgtgtggaatccactgaatgtccctgcgtccatagcggaaagagatatcccccgggcactagtctctctagggattgcaacacttgtatttgccggaattcccagtggatatgctccaatgaggaatgtcccggagagtgtctggttaccgggcagagtcacttcaagtccttcgataatcggtattttacgttctcaggcatttgtcaatatctgctggcccgggactgtcaagatcacagtttttcgatcgtgattgagacagtacagtgcgccgatgaccgtgacgcggtttgtacccgctctgtgacggtgcgtctgcctggactgcataactctctggtaaagcttaaacacggagcgggcgtcgccatggacggccaagatgtccaactgcctcttctgaaaggtgatctgaggatacagcacactgtgaccgcctctgtgcgactgtcctacggagaagacctgcaaatggactgggatggacgtggccgactgctggtgaaattatcccccgtgtacgccggcaagacctgcgggctgtgcgggaattacaacggtaaccagggggacgactttctgacgcccagtggactcgccgaaccacgtgtggaagacttcggaaatgcctggaagctgcatggtgactgccaggacctgcagaagcagcattctgacccttgtgcattgaacccacgcatgactcggttttccgaggaagcgtgtgccgtcctgaccagtccaacctttgaggcatgccatcgggcagtctcccccctgccttacctgcgcaattgtcgctacgatgtctgttcatgttctgatggtagggaatgcctgtgtggagccctcgcaagttacgctgctgcctgcgctgggcggggcgtccgcgttgcctggagggaacccggacggtgcgagcttaattgccctaaaggccaggtctatctccagtgcggaacaccttgtaatctgacgtgccgcagcctatcctatccagacgaagagtgcaacgaagcttgcctggagggctgcttctgtccgccaggcctgtatatggatgagaggggggattgcgtgcctaaagcgcagtgcccatgctactatgatggtgagatcttccagcccgaggatattttttcagaccaccatacaatgtgttattgcgaggatggcttcatgcattgtactatgtccggcgtgccaggatcattactgcccgacgccgtgctgtcctccccattgtcccaccgctctaagcgatcacttagctgccgccccccaatggtcaaactggtctgcccagccgacaatctgcgggctgaggggctggaatgtacaaagacgtgtcagaactacgacctggagtgcatgagtatggggtgtgtgagtggctgtttgtgccctcctggcatggtgcggcatgagaaccgctgtgttgccctggaaagatgcccgtgctttcaccaaggtaaagaatacgctccaggggaaaccgtgaaaattggctgcaacacttgcgtctgccaagaccggaagtggaactgtactgatcacgtctgtgatgcaacctgcagcactataggtatggcacattatttgactttcgatggcttgaagtacctattcccaggtgaatgccagtacgtgctcgtgcaggactattgtggctccaaccctgggaccttcagaatccttgtaggtaataaaggctgctctcacccctccgttaaatgtaagaagagggtaaccatcttggttgaggggggggaaatcgaactttttgatggcgaggtgaacgttaagagacctatgaaagatgaaacccacttcgaagtcgttgagagtggacgctacattattttgcttctgggaaaagccctttctgtggtgtgggatcggcacctatccatttctgtggtgctgaagcaaacgtatcaggaaaaagtttgtgggctgtgtggtaacttcgacggaatacagaacaatgatctgactagtagtaatctgcaagtcgaggaagatccggtggacttcggcaacagttggaaggtctcttctcagtgcgcagatacccgcaaagtgccacttgactctagcccggcgacatgccataacaacattatgaagcagacgatggtggatagctcctgtaggatattgacctccgatgtcttccaggattgtaacaagctagttgacccagagccctacctggacgtctgcatctatgacacttgttcttgtgaaagcatcggcgattgcgcatgtttctgcgatactatcgccgcatatgcccacgtttgcgcccaacacggcaaggtcgtgacctggagaacagctacactttgtccccagagctgtgaagagaggaatctccgagaaaatggttatgaatgcgagtggaggtataactcatgtgctcctgcttgccaggtcacctgtcagcacccagaacccctggcctgccctgtgcaatgcgtcgaaggctgtcatgctcactgccccccaggcaaaatcttggatgagctactccaaacttgcgtggatccggaggactgtcccgtgtgcgaagtggccggaaggagattcgcctccgggaagaaagttaccctcaatcccagcgaccccgagcactgtcagatctgtcactgtgatgtggtaaacctgacatgcgaggcatgtcaggaacctggaggattggtggtaccgccaaccgacgctcctgtaagcccaaccaccctatacgtggaggatatctctgaaccgcctctccacgacttctattgctcgcgcctgctggacctcgtgttccttttagacggctcatctagactgtccgaggccgagtttgaggtcctgaaagcatttgtagtggacatgatggagcggctgagaatcagccagaaatgggtgagggtggctgttgtggagtatcatgatgggagtcacgcctatatcggtctgaaggatcggaaacgcccaagtgaactgcgtaggatcgcctcgcaggtcaagtatgctggatcccaggtggcttctacctccgaggtgctgaagtatactctttttcaaatctttagcaagatagaccggcccgaggcgtcacggattacgcttctgcttatggcatcccaggaacctcagagaatgtccaggaactttgtgaggtacgtgcagggcctgaagaaaaaaaaggtgatagtgatacctgttggcatcggcccccatgcgaacctgaagcagatccggttaatcgagaaacaggcaccagagaataaggcttttgtactatcttctgtcgacgagctggagcagcagagagacgagattgttagttacctgtgtgacctagccccagaagcccccccccctacgctgcccccagatatggctcaagtcactgtggggccaggcttgctcggcgtctcaaccctgggacctaagcggaacagcatggtgctcgacgtggcgtttgtgctggagggatccgacaaaatcggggaggcagactttaatagatccaaagagtttatggaagaagtgattcaaaggatggacgttgggcaggattcaatccacgtgaccgtgctgcaatacagctacatggttaccgttgagtaccccttcagcgaggctcagtctaaaggggacattttgcagcgcgtgcgagagattaggtaccaaggtggtaacagaaccaacacaggtttggccctccggtacctctctgaccactcgttcctagttagtcaaggcgatagggagcaggctcctaacctcgtgtacatggtgaccggcaaccctgcgtccgatgaaataaagcggcttcccggcgatatacaggtagtgcccataggggtcggcccaaacgctaacgttcaggagttagagcgcatcggctggccaaacgcacccatcctgatccaggacttcgaaacactgccacgggaggctcccgacctggtattgcaacggtgttgtagcggggaagggctgcagataccaaccctatctcccgcgcccgattgcagtcagcccttggatgtgattctcctgttagacgggagctcgtcttttccggcttcatatttcgatgaaatgaagagcttcgctaaggcattcatctccaaggctaacattggaccaaggttgacccaggtctctgtcctgcaatatggatccatcaccactatagacgtgccgtggaacgtggttccggagaaagcccacctgctgagtctggtggatgtgatgcagcgggagggcggcccatcccagattggagatgccctgggatttgcagttagatacctgaccagcgaaatgcacggagcccggcccggcgcatctaaggccgtggtgatcctagtgacggatgttagtgtggactcagtggacgccgcagcggacgcagcgcgcagtaatcgcgtgaccgtcttccctatcggtattggggaccgctacgacgcggcccagctccgcattctcgctggccccgccggcgactccaacgtggtgaaactgcagaggatcgaagatctaccgacgatggtaacactgggtaactcctttctacacaaattatgttcaggcttcgtgcgtatatgcatggacgaagacggaaatgagaaacggcctggcgacgtgtggactcttcctgatcagtgtcacaccgtgacctgccagccagacggccaaacgctgctgaagtctcatagagtgaattgcgacaggggattgaggccaagttgtcctaactctcagtctcccgtcaaggttgaagagacctgtggctgtaggtggacctgcccttgcgtgtgcacgggttcttctacaaggcacattgtcacatttgacgggcaaaacttcaaactgacaggtagttgtagctacgtgctgttccagaataaagaacaggatttggaagtaatcctgcacaatggggcgtgcagtccaggagcccgccagggatgtatgaaatcaatcgaggtcaaacatagcgccttgtccgtagaactccattccgacatggaagtcaccgttaacgggaggctggtgagcgtcccatacgtcggaggcaatatggaggttaacgtctatggagctattatgcacgaggttaggtttaaccacctggggcatatattcacattcactcctcaaaacaacgagttccagttgcaactctcacctaaaacattcgcctctaaaacctatggcctctgcggcatctgcgatgagaacggcgcgaatgatttcatgctgcgggacggaactgtcacgaccgattggaaaactctcgtccaagaatggaccgtacagcgacctgggcagacttgtcaaccaattctggaagagcagtgcttggttcccgattctagccactgccaagtcctcctcttaccactgttcgcagaatgccacaaggtgctggctccagccactttttatgccatttgccagcaggactcttgccatcaggaacaggtctgtgaggtcattgcgtcctacgctcacctgtgccgaaccaatggagtttgtgttgattggcgaacacctgatttttgcgccatgagctgccccccttcgctggtgtacaatcactgcgagcacgggtgcccgagacattgtgacggcaacgtgagcagctgcggggaccacccttccgagggatgtttctgtccccctgataaggtaatgctggagggttcatgcgtccccgaggaagcttgcacacaatgtataggggaggatggggtgcagcaccagttcctggaggcctgggtacctgatcatcagccatgccagatttgtacttgcctttcaggccgtaaggtgaactgcactactcaaccatgtcctacggctaaggcccccacttgcgggttgtgtgaagtggccagactgcgacagaatgcagatcagtgctgtcccgagtatgagtgcgtgtgcgaccccgtaagttgtgacctgcctccagtgccacactgtgaaagaggacttcagcccaccttgacaaatccaggcgagtgccggcccaacttcacatgcgcatgccgcaaggaggagtgcaagcgggtgagtccgccctcctgcccccctcacaggctgccaaccctcaggaaaacacagtgctgtgatgagtacgagtgcgcctgtaattgcgtgaactccaccgttagctgtcccctcggctacctagccagtacagccaccaacgattgcgggtgtacaaccaccacctgtctgcccgacaaagtatgtgtgcacagatccactatctatccggtcgggcaattttgggaggaaggatgcgatgtctgcacatgcacagatatggaggacgccgtcatgggtctgagagtggcacagtgctctcagaagccgtgcgaagatagctgccgcagcgggtttacttacgtgctccacgaaggcgaatgttgtgggcggtgcctccccagtgcctgcgaagtcgttactggaagcccccgtggcgactctcaatcatcttggaaatccgtggggtcacagtgggcctcccccgagaatccctgcctgatcaatgaatgcgtgagggttaaggaggaggtgttcatacagcaaaggaacgtatcgtgtccccaactcgaagtcccggtctgtccctccggctttcagttatcgtgcaagacaagcgcatgttgcccctcctgccgttgtgagagaatggaggcttgtatgctcaatggaacagtgatcggaccaggaaagacagttatgatcgacgtgtgtaccacatgccgctgcatggtccaggtgggggtgatttcgggtttcaagttggaatgtcgcaaaaccacatgtaatccatgtcctctcggctacaaagaagaaaataatactggtgagtgttgtgggcgatgcttgccaacagcctgtacaatccaactgcgcggagggcaaatcatgaccctgaagcgggatgagacactgcaagatggctgcgacacccatttttgcaaggttaacgagaggggcgagtatttctgggagaaaagggtgacaggctgccctcccttcgatgagcataaatgtttggcggaggggggcaagattatgaagatacctggaacctgctgcgacacttgcgaagaaccagaatgcaatgatataacagctcgtttacaatatgtcaaagtgggtagttgtaagtcagaggttgaggttgacatccactactgtcagggcaagtgcgcatccaaagccatgtattctatagatattaacgatgttcaggaccaatgtagctgctgtagccccactagaacagagcccatgcaggtggccctccactgcacaaacggttccgtggtgtatcacgaggtgctgaacgccatggaatgcaagtgttcaccgaggaaatgctccaaa

SEQ ID NO: 21345 - DNA, 8439 bp, synthetic construct
  misc_feature 1..8439: note = source = /note="Description of Artificial Sequence: Synthetic coding sequence"
  source 1..8439: mol_type = other DNA
atgatacccgcccgattcgctggtgttcttctggcgctggcactcatcctgccgggaactctctgtgccgagggaactcggggacggagctccacggcccgctgttccctgttcggctccgacttcgttaacaccttcgacggatccatgtactccttcgcaggatactgtagctacctgttggccggaggttgtcaaaaacgctccttctcgatcattggcgatttccaaaacgggaagcgcgtgtccctttccgtgtacctgggagaattcttcgatatccacctgttcgttaacggcactgtgacccaaggtgaccagcgcgtgtcgatgccttacgcgtctaagggcttgtacctggagactgaggctggctactacaaactgtcgggagaggcatacggatttgtcgccaggattgacggctcgggaaactttcaggtactgctgtcggatcgctacttcaataagacttgcggactctgtggtaatttcaatatctttgccgaagatgactttatgactcaggagggcacccttacttccgatccatacgattttgccaactcttgggccctttcgtccggagaacagtggtgcgaacgggccagcccaccgagctcatcatgcaacatcagctcgggcgaaatgcagaagggcctgtgggaacagtgccagctcctcaaatcgacctcggtgttcgcccgctgccacccgcttgtggatccagagccattcgtggctctgtgcgaaaagacgctctgcgaatgcgccggaggactggagtgcgcctgccctgctctcctggagtacgcgagaacttgcgcccaggagggaatggtgctgtatggatggaccgatcactcggcatgcagccccgtctgccctgctggaatggaataccggcagtgtgtgagcccttgtgcaagaacctgccaatcactccacatcaacgagatgtgccaggaacggtgcgtcgacggctgctcctgcccggagggacagctccttgacgaagggctgtgcgtagagagcactgagtgcccttgcgtgcactcgggaaaaaggtacccaccgggtaccagcctctcccgcgactgcaacacctgcatctgtcgcaattcccagtggatctgctcgaacgaggaatgcccaggcgagtgcctcgtcacgggacaaagccacttcaagagttttgacaacagatactttaccttctcaggaatctgccagtacctccttgcaagagactgtcaggatcactccttttccatcgtcattgaaaccgttcagtgtgcggacgaccgggatgctgtctgcactaggtccgtaacggtgcggcttccaggcttgcataactccctggtcaaactgaagcatggggctggggtggctatggacggacaggacgtgcaactgcccctgctcaaaggagatcttcggatccagcacaccgtaacggcgtcggtgcggctgagctacggggaagatctccaaatggattgggatgggcgggggagattgctcgtgaagctgtcgccagtatacgcaggcaagacttgtggactctgcggcaattacaatggtaatcagggcgatgattttctgactccatcgggactggctgaaccgcgggtcgaagattttggaaacgcatggaaactgcacggagactgccaggacctgcaaaaacaacacagcgacccgtgtgctctcaatccgcggatgacccgcttttcagaagaagcctgcgccgttctgacttccccaaccttcgaggcttgccatcgcgctgtgtcgccactgccttaccttcggaactgccgctacgacgtctgctcgtgttccgatggaagggaatgtctttgtggagcactggcctcgtacgcggcggcgtgcgcaggtcgcggggtgcgcgtcgcctggagggaaccaggccggtgcgagctcaattgtcctaagggacaagtttaccttcagtgcgggactccgtgcaatcttacttgccggtcgctctcgtacccggacgaagaatgcaatgaagcctgcctggaaggctgcttctgcccccctgggttgtatatggacgagcggggtgactgcgttcccaaagcgcaatgcccgtgctactacgatggggagatcttccaaccggaggacatcttctcggatcaccatacgatgtgttactgcgaggacggctttatgcattgtactatgtccggtgtgccgggatcgctcctgccggacgcggtgctcagcagcccactcagccatcggtcaaagcggtccttgtcctgtcggccgccaatggtcaagctggtgtgcccggccgacaacctgcgggccgaaggtctggagtgcaccaagacttgtcaaaactacgacctcgagtgtatgtccatgggctgcgtctctggctgcctttgtccgccgggtatggtccgccacgagaaccgatgtgtggcccttgagcggtgtccatgttttcatcagggaaaggagtacgcacctggagagactgtcaagatcgggtgcaacacctgtgtctgccaggacagaaagtggaattgcactgaccacgtgtgtgacgccacctgctcaaccatcggaatggcacactacctgaccttcgatggactgaagtatttgttcccgggtgagtgccagtacgtcctggttcaggactactgcggctccaatccgggcacctttcggattctcgtcggcaacaagggatgctcacacccgagcgtgaagtgcaaaaaacgcgttaccatcctggtggaaggaggggaaatcgagctttttgacggcgaagtcaacgttaaaagaccgatgaaggacgagactcactttgaagtggtcgagtctggccgatacatcatcctgctgctgggtaaggccctcagcgtcgtctgggatcgccacctgagcatttcagttgtgctcaagcagacgtaccaagaaaaagtgtgtggactctgtgggaatttcgatggaatccaaaacaacgatctgacctcctccaatctgcaagtggaggaggacccagtggatttcggaaactcgtggaaggtgtcatcacagtgcgcggatacgcggaaggtgccactggattcgtccccggccacgtgtcataacaacatcatgaaacagaccatggttgactcgagctgtcgcatcctgaccagcgacgtgttccaggactgcaataaactcgtcgatccggaaccttacctggacgtgtgcatctacgacacgtgctcctgtgaatcgatcggagattgtgcatgcttctgcgatactattgctgcatacgctcacgtttgcgctcagcacggtaaggtcgtgacttggcggactgccactttgtgcccccagtcatgcgaggaacggaatcttcgtgaaaacggatacgagtgcgaatggcgctacaacagctgcgcgccggcatgccaggtgacctgccagcaccccgaacccctggcatgcccggtgcagtgcgtggaaggatgccacgcgcattgcccaccgggcaaaatcctcgacgagctgcttcaaacgtgcgtggacccagaggattgcccggtctgtgaagtggccggaagaaggttcgctagcggaaaaaaggtcactctgaatccgagcgacccagagcattgccaaatctgtcattgcgacgtggtgaacctcacctgcgaagcatgccaggaacctggcgggttggtcgtgcctccgactgacgcccccgtgtctccgaccactctctacgtggaagatatctcagagccgccgctgcatgacttttactgcagcaggctgttggatctggtattcctcctcgatggttcttcccggctctctgaagcggagttcgaggtcctgaaggcattcgtcgtggatatgatggaacgcctccgaatctcgcaaaaatgggtgcgtgtggcggtcgtggagtaccatgatggctcccatgcctatatcggactgaaggaccggaaaagaccatccgagctgcgcagaatcgcgagccaagtcaagtatgccggttcccaggtggccagcacttcagaagtgctcaagtacactctgttccaaatcttttccaagatcgatagaccagaagcgtcccgcattaccctcctgctcatggctagccaagaaccgcaaaggatgtcgagaaacttcgtgcgttacgtgcaaggacttaagaagaaaaaagtgatagtgatccccgtgggaatcggaccgcatgctaacctcaaacaaattcggttgattgaaaagcaggcccctgagaataaggcgttcgtgctttcttctgttgacgagctcgagcaacagcgggacgaaatcgtgtcatacctgtgtgacctggcccctgaagcgcccccgcctactttgccaccagacatggcccaggtcacggtcgggccaggtctgctgggggtgtcgaccctgggcccaaagcggaattccatggtgctggatgtcgcattcgtcctggaagggtccgataagattggagaggccgacttcaatcggagcaaggaattcatggaagaagtgatccagagaatggacgttggacaggattcgatccacgtgaccgtgctgcagtactcctacatggtgactgtggagtaccccttctcagaagcacagtccaagggagacatcttgcagagagtgcgcgaaattagataccagggcggaaaccgcaccaatactggactggctctgcgctatttgagcgaccattcattcctggtgagccagggagatcgtgaacaggctccgaacctggtatacatggtgaccggtaacccggcctcggacgaaatcaagcgcctgccgggagacatccaagtcgtgccgatcggcgtggggccgaacgcgaatgttcaggagctggagcgcattggatggccgaacgccccgattctcatccaagatttcgaaaccctgcctcgagaagccccagatttggtcctgcaaaggtgctgcagcggagagggcctccagattcctactctctcgccggccccggactgctctcagccgctcgacgtgatcttgctcctcgacggatcgtcatccttccccgcctcctacttcgacgagatgaagtcattcgcgaaggcattcatctcaaaggccaatatcggcccacggctcactcaggtgtccgtcctgcagtatggctctataactactattgacgtcccctggaacgtggtgccggaaaaggcacacctgctgtcgctggtcgacgtcatgcagagagaaggaggacctagccagatcggcgacgccctgggattcgcagtgagatacctgacctctgagatgcacggtgcccgcccgggggcgtccaaggccgtcgtgatcctggtgactgacgtctccgtggactccgtcgacgcggctgcggatgcggccagatcaaacagagtgaccgtgtttcccatcggaatcggcgatcggtacgacgcggcacagctcagaatcctcgccggccctgccggagattcgaacgtggtgaagctgcagaggatcgaggacctgccgaccatggtgacccttggaaattcgttcctgcataagctctgtagcggtttcgtgcgcatctgtatggacgaggatgggaacgaaaaacgcccaggggacgtgtggaccctgccggatcaatgccacaccgtcacctgtcaaccggacggacaaactctccttaagtcacatcgcgtcaattgcgatagaggtttgcgcccatcctgtccgaattcccagtcaccagtgaaagtcgaagaaacctgcggatgccgctggacttgcccttgtgtgtgtaccggatcgtcgacccgacacatcgtgacctttgacggacagaatttcaagctcaccggatcctgttcatatgtgctgttccagaacaaagaacaagacctggaggtgatcctgcacaatggtgcctgcagcccaggggcgcgccagggatgtatgaagtccattgaggtcaaacactcagccctctcggtggaactgcacagcgatatggaagtaaccgtcaacggaaggctggtgagcgtgccctacgtgggtggaaacatggaagtgaatgtgtacggagcaatcatgcacgaggtgcgcttcaaccacctgggtcacatattcactttcacccctcagaacaatgaattccagcttcaacttagccctaagacgtttgcctccaagacttacggactgtgcggtatctgtgacgaaaacggcgccaacgatttcatgctgcgtgacggaactgtgactacggactggaaaaccctggtccaagaatggactgtgcagcgaccaggacaaacctgccaaccgatcctggaggaacaatgtttggtgcctgacagtagccactgccaggtgttgctcctgcctctctttgcagagtgccataaggttctggctcctgcaaccttctacgcgatctgtcagcaagattcgtgccatcaggaacaagtctgcgaagtgatcgcctcatacgctcacctgtgcagaactaatggggtctgtgtggattggcgtacccccgacttctgtgcgatgagctgcccaccgtcgctggtgtacaaccactgtgagcacggatgccctcgtcactgcgacggaaacgtgtcctcgtgcggcgaccacccctccgaaggatgcttctgcccgccggacaaggtgatgctggaaggatcctgcgtgccagaggaggcttgtacgcagtgtatcggcgaagatggagtccagcaccaattcctggaagcatgggtccctgatcaccaaccgtgtcagatttgtacgtgtttgtccgggcgcaaggtgaactgcaccacgcagccgtgcccgactgctaaggcccccacctgcggattgtgcgaggtcgcgcgcctcaggcaaaacgccgatcaatgctgcccagaatacgaatgtgtgtgcgaccctgtgtcgtgtgacttgccaccggtgccccattgcgaaaggggattgcagccaaccctgaccaacccgggggagtgcagaccgaacttcacttgcgcgtgccggaaggaggagtgtaagagagtgtccccaccatcgtgcccaccgcatcggttgcctacccttaggaaaacgcagtgctgcgacgaatacgaatgcgcctgcaactgtgtgaactcgaccgtgtcgtgcccgctgggctacctcgcctcgacggcgaccaacgactgcgggtgtaccaccaccacttgcctccctgacaaggtctgcgtccacaggtcaactatctacccagtgggacagttctgggaagagggatgcgatgtgtgcacttgcaccgatatggaggatgccgtcatgggacttagagttgcgcagtgctcacaaaaaccgtgcgaggactcatgtcgatctggctttacctacgtgctgcacgagggagaatgctgcgggcgctgcctgcccagcgcgtgcgaggtggtgaccggatcaccgagaggcgactctcagagctcgtggaagtccgtggggtcgcaatgggcctcgccagaaaatccctgtctcatcaacgagtgcgtgcgcgtgaaggaagaggtgtttatccagcagcggaatgtgtcgtgcccccaactggaagtgccggtctgtccaagcggcttccagttgtcgtgcaagacctccgcctgttgcccttcttgccgctgcgagcggatggaggcatgtatgctcaacggcaccgtcatcggcccgggtaaaactgtgatgatcgacgtctgtacgacctgtcgctgcatggtccaggttggagtcatctccggctttaagttggaatgccgcaagacgacctgtaacccatgccctctcggatataaggaggagaacaacaccggcgagtgctgcggacgctgcctcccgaccgcgtgcactattcaactgcgcgggggacagatcatgactctgaaacgggatgaaaccctgcaagacggatgcgacactcatttctgtaaggtgaatgaacgaggagaatacttctgggaaaagagagtaactggctgccccccgtttgatgagcataagtgccttgcggaaggtggtaaaatcatgaagatcccgggcacttgctgcgatacttgcgaagagcccgaatgcaacgatatcaccgcacgcctgcagtacgtgaaggtgggttcatgcaagagtgaagtggaagtcgacatccattactgccaggggaagtgcgcctcaaaagctatgtactcgatcgacatcaacgacgtgcaggaccaatgctcatgctgctcgccgactcgcactgagccaatgcaggtggcactgcattgcaccaatggtagtgtggtgtaccatgaagtgctgaatgctatggaatgcaagtgctcgccccggaagtgcagcaaa

SEQ ID NO: 21346 - DNA, 8439 bp, synthetic construct
  misc_feature 1..8439: note = source = /note="Description of Artificial Sequence: Synthetic coding sequence"
  source 1..8439: mol_type = other DNA
atgattccagccagatttgcaggagtacttctcgcccttgccctgattctgcccggtactctgtgtgctgaaggcacacggggacggagcagtactgctagatgctctctctttggatccgattttgttaacactttcgatggttccatgtactctttcgcaggctactgctcttacctcttggccggaggctgccagaagagatcattctccattataggcgatttccagaatggaaaacgcgtttccctctccgtttacctgggagagttctttgatatccatctgtttgtcaacggaacagtaacgcagggcgaccaaagagtttccatgccttacgcctctaaaggcctctaccttgagaccgaagccggctattacaaacttagtggggaggcctatggcttcgtggcccgcatagacgggtccgggaacttccaagttttgctgagtgatcggtattttaacaagacttgcgggctttgtggaaacttcaatatttttgcagaggacgatttcatgacccaggaagggacgctgacctcagacccctacgactttgcaaacagttgggccctgtcctccggtgaacagtggtgcgaacgagcaagcccgcccagttccagttgtaacatcagttcaggggagatgcagaagggcctgtgggagcagtgtcaactgctcaagtccacgagtgtgtttgccaggtgccatcctcttgtggacccagagcccttcgttgctctgtgcgagaaaactctttgtgagtgcgctggcggccttgagtgtgcatgccctgcgcttctggaatacgcacgcacctgtgcgcaggagggcatggtgctgtacggatggaccgaccacagcgcctgctcacctgtgtgcccagctggcatggaatatcgacaatgtgttagtccctgtgccagaacttgccaatcactgcatatcaacgagatgtgccaggaaaggtgcgtggatggatgtagttgccctgaagggcagctgctggacgaaggcttgtgcgttgagtctacagagtgtccctgtgtgcacagtgggaaacgctatccacctggtacatcactttcaagggattgtaacacttgcatttgtcgcaatagtcaatggatttgttctaatgaagaatgcccaggggaatgccttgtgacaggccagtctcacttcaagtcttttgacaacagatacttcacttttagcgggatttgccagtacctgctggctcgggactgtcaagatcactcattctcaatagtcatcgagactgtgcagtgcgctgatgaccgggatgcggtctgcacccgcagcgtgactgtgcgcctccccggactgcacaactcccttgtcaagcttaaacacggagcgggcgtggccatggatggccaggatgtacagcttccactgctgaagggggaccttaggatccaacacaccgtgaccgcaagcgtgcggctctcatatggggaagacctgcagatggactgggatggccgaggtaggcttctcgtcaagctttcaccagtgtacgcaggtaaaacgtgtggactgtgcggaaattacaacgggaatcagggagatgattttctgacccctagcggcttggcagagcccagggttgaggactttggcaacgcctggaagctgcacggtgattgtcaggaccttcagaagcaacacagtgatccttgcgcactgaacccacggatgacccggtttagcgaagaggcctgcgccgtccttacttcccccacattcgaggcgtgccatagagcagtctcaccactgccttacctcagaaattgtaggtatgacgtgtgctcatgcagcgatgggagagaatgtctttgcggcgcacttgcctcttatgccgctgcatgcgcaggtcgcggggtcagagtggcgtggcgggagcctgggcggtgtgaacttaattgtcccaaaggccaagtttatctgcagtgtggaacaccttgtaacctgacttgtagaagtctcagctaccccgatgaggagtgtaatgaagcatgtttggagggatgcttctgtcctcctggactgtacatggacgagcggggtgactgtgtgcctaaggcccagtgcccctgctattacgatggcgaaattttccaacctgaagacatcttcagtgaccaccacacaatgtgctattgcgaggatggcttcatgcactgtacaatgtcaggtgttcccggcagtctgcttccagatgccgtcctgtcttctcccctcagtcatagatctaaacggtctctgtcctgtcgaccgccaatggtaaaactggtgtgccctgccgacaatctgagggcggagggcctcgaatgtaccaaaacatgtcagaactacgatctggagtgcatgtctatgggttgtgtgagtggctgcctgtgccccccaggcatggtgcgacacgaaaaccggtgtgtggcgctggagcgatgcccatgtttccatcaaggcaaagagtatgcgcccggcgagactgtaaagatcggctgcaatacatgcgtttgccaggaccggaagtggaactgcactgatcacgtctgcgacgcaacatgtagcacaataggaatggcccattatctgacatttgatggtttgaagtacctcttccccggagaatgccaatatgttctggtgcaggattattgcggcagcaatccaggtacctttcgcatactggtcggaaataagggttgtagccatccatcagtcaaatgcaagaagagagtcactatcctcgttgagggcggcgagatagaactgttcgatggcgaagtgaacgtcaaaaggcctatgaaggatgagacccattttgaggtggtggaatctgggagatatatcattctgttgttgggcaaggcgctcagcgtggtgtgggaccggcatttgtctatcagtgtggtattgaagcagacttaccaggaaaaggtctgtggcctgtgtggaaacttcgacggcatccagaataatgacctcacttcaagcaatctgcaagtggaggaagaccccgttgactttggaaatagctggaaggtgtcctcacaatgtgccgatactcgcaaggttcccctggatagctctccagcgacatgccataataatatcatgaagcagacaatggttgatagttcctgccgaatcctgacttccgatgtgtttcaggactgcaacaaattggtggatccagaaccctacctggacgtctgtatctacgacacatgttcttgcgaatctatcggggactgtgcctgtttctgcgatacaatagctgcgtatgcgcacgtctgtgcccaacacgggaaagtcgtcacatggcgaaccgctactctctgtccccagagctgcgaagaaagaaacctgcgagagaacggctatgagtgcgaatggaggtataattcttgtgctccagcctgtcaggtgacttgtcaacatccagagccactcgcatgtcccgtgcagtgcgtagaagggtgtcatgcccactgtcccccagggaagatcttggatgagctgctccagacatgcgtggacccagaggattgtccagtatgtgaggtggcaggccgccgatttgcttccgggaaaaaggttaccttgaatccctcagatcctgagcactgtcagatctgccactgcgacgtcgtgaatttgacgtgcgaagcttgtcaggagcctggtggcctcgtcgtaccgccgacggacgcccccgtctcccccactaccctttatgttgaggacatctccgaacccccactgcacgatttttactgctctcggctcctggatctcgtgtttctgctggacggatcatctcggctcagcgaggctgaattcgaagtgctcaaggctttcgtggtggatatgatggaacgccttcggatcagccagaagtgggtgcgcgttgcggtagtggaatatcacgatggatctcatgcttacattggcctcaaggatagaaaacgcccatccgagctgcgcagaatcgccagtcaggtaaaatatgccggctcccaggtagcctctaccagtgaggtcttgaagtacaccctgttccagatcttctctaaaattgaccggccggaagcttctcgaatcaccctgctgctgatggctagccaagaaccgcagcgcatgtcccggaattttgttaggtacgtgcaggggttgaagaagaagaaggtgatagtgatacccgtgggaatcgggcctcacgctaaccttaaacagatccggcttatcgaaaaacaggccccggaaaataaggccttcgtcctgagctctgtcgatgaactggaacagcagcgggacgagatcgtgtcttacttgtgtgatctcgcgccagaggcacctccgcctacactccctcccgacatggctcaagttacagttggccccgggttgctgggggtcagcacactggggccaaaacggaacagtatggtgctcgacgttgcatttgtactcgaggggtccgacaagatcggtgaggcggattttaataggagcaaagaattcatggaagaagtcattcagcggatggatgtaggacaggactccattcatgtgaccgtgttgcagtactcatatatggttaccgttgaatatcccttcagtgaagcccaatccaagggcgacatcctgcagagagtgcgggagattcgctaccagggggggaacagaacaaataccggacttgccctgcgatacctttccgaccactcttttctcgtctcacagggggacagggagcaggcaccaaacctggtgtacatggttaccggcaatccagcaagcgacgagatcaaaagactcccaggggacatacaggttgtaccaatcggcgtggggcccaacgctaacgtgcaggagctggagcgaatcggctggccaaacgctcccattctgattcaggacttcgagacacttcccagggaggcccctgacctggtgctgcagagatgctgttctggggagggtctgcagattcctaccttgagtcccgccccagattgtagccaaccactcgacgtgattctgctcctggatggcagctcatctttcccagcttcatatttcgatgagatgaagtcttttgcgaaggcattcatctcaaaggcgaatatcggtccaaggttgacgcaggtgagtgtcctgcagtacgggtctattacaaccattgacgtgccttggaatgtggtgccggagaaggcacatctgctctcattggtggatgtgatgcagcgcgagggtggacctagccagattggcgatgcactgggatttgccgtacgctatctgacctccgaaatgcatggcgctaggccaggggcgtccaaagccgtggtgattctcgtcactgatgtgtctgtggattctgttgacgccgctgccgatgctgcaagatccaaccgggtcacagtgtttcccatcggaatcggagataggtatgacgccgctcaactcaggattcttgccggaccagccggcgactctaacgtggtgaagctccagcggatcgaggaccttcccactatggtgaccctgggcaattctttcctgcataaattgtgttctggttttgtacgcatttgcatggacgaggacggcaacgagaaaaggccaggggacgtgtggactttgcctgaccaatgccacaccgtcacctgtcagccagacggtcagacactgttgaagagccaccgagtgaattgcgatcgaggcctgaggccctcctgccctaacagccagagccctgtgaaggtggaagagacatgtggctgtagatggacttgtccatgtgtttgcaccggctctagtaccagacatatcgtaacatttgacggacaaaactttaagctgactgggagttgctcctacgtgctgtttcaaaacaaagaacaggacttggaagtcatactgcacaacggagcttgtagcccaggtgccaggcagggctgcatgaagtccattgaggtcaagcacagcgccctctccgtggagctgcactccgatatggaagtcactgtgaacggacggctggtcagtgttccctacgtgggcggtaacatggaggtgaacgtgtatggtgcaatcatgcatgaagtgaggttcaaccatcttggacacattttcacatttacccctcagaataatgagtttcagctgcaactgtcacccaagacattcgccagcaagacctatggcttgtgcggcatctgcgatgaaaacggggccaacgacttcatgttgcgggatggcaccgtaaccaccgactggaagaccttggtgcaggagtggaccgtgcagaggccagggcaaacatgccagccgatactggaggagcagtgtttggtgcctgacagcagccattgtcaagtcctgctgctgccactcttcgccgagtgtcataaggtcctggcacccgccaccttttatgcaatttgccaacaagatagctgccatcaggagcaggtctgtgaggtcatcgcctcctacgcacacctgtgcaggacaaatggagtgtgtgtagactggaggacccccgatttttgtgccatgagctgccctccttcactggtctacaatcactgcgaacacggatgtccccgccactgtgacggaaacgtaagctcatgtggagaccacccttctgaaggctgtttctgcccgcctgataaggtgatgctggaggggtcctgcgtgcccgaggaggcctgtacacagtgcattggcgaagacggggtgcagcatcagtttcttgaagcttgggttccggaccaccaaccctgtcagatttgcacgtgtctctctgggagaaaagttaattgtaccacccagccatgccctaccgcaaaggcccccacctgtgggttgtgcgaggtggccagactgcggcagaatgcagaccagtgttgtcccgagtacgaatgcgtgtgtgatcctgtttcttgcgacctgcctccggtcccacattgtgagagaggattgcaacccacgctgactaatccaggtgaatgccggccgaacttcacctgcgcgtgccgaaaagaagagtgcaaacgggtgagtccacctagctgccccccccacaggttgcctaccctgagaaagacacagtgctgtgatgagtatgaatgtgcttgcaactgtgtaaattccaccgtgtcctgcccgctcggttacctggcaagcactgccacgaacgattgtggatgtacaaccaccacttgcctccctgataaggtatgtgtgcatcggagcaccatctaccctgtaggccagttctgggaagagggttgtgatgtgtgcacatgtactgacatggaggatgccgtgatggggctcagagttgcacaatgttcccagaaaccctgtgaagactcatgtagatccggttttacttacgtgttgcatgagggagagtgctgtggcaggtgtttgccatcagcctgcgaggtggttacaggcagtccccggggggattcacagagtagttggaagtccgtcggatctcagtgggcctccccagagaacccttgccttattaacgagtgcgtcagagtcaaagaggaggtcttcatccagcagcgaaatgtgtcatgcccgcaactcgaggtacccgtgtgtccatccggctttcagcttagctgcaaaactagcgcttgctgcccgagttgtcgctgtgagaggatggaagcttgtatgctgaacggtaccgtgatcgggcctggtaaaactgtaatgatcgatgtgtgcactacgtgccgctgcatggtccaagttggcgtgattagcggttttaagctggaatgtcgaaaaacaacctgtaatccatgtcccctcgggtacaaggaagaaaataacacgggcgagtgttgcggtaggtgtttgcctacggcttgcaccattcagctcagaggtgggcagatcatgaccttgaagagagacgaaaccttgcaggatggatgtgacacccacttctgcaaggttaatgagcggggcgaatacttctgggagaagcgggtcactgggtgtcccccgtttgacgagcacaagtgtttggcggagggtggtaaaattatgaagattcctggaacatgttgcgacacctgcgaggagcctgagtgtaacgatattaccgctcggctccaatacgtgaaagtcggcagctgcaaatcagaggtcgaagttgatattcactattgtcaaggaaaatgcgccagtaaagccatgtactcaattgacatcaacgacgttcaggaccagtgctcatgctgttctccaacacgaaccgagccaatgcaggtagctctccattgcacaaacggttccgtcgtgtaccatgaagtgctgaacgcaatggaatgtaagtgcagccccaggaagtgctccaag

SEQ ID NO: 21347 - DNA, 8439 bp, synthetic construct
  misc_feature 1..8439: note = source = /note="Description of Artificial Sequence: Synthetic coding sequence"
  source 1..8439: mol_type = other DNA
atgattccggcccggttcgctggggtcctgttggctctggccctgatcctcccgggtactctgtgcgcggaagggaccagaggaaggtcctcaacggcccgctgctcgctcttcggctcggacttcgtcaacaccttcgacggctcgatgtacagcttcgcgggctactgttcatatttgctggcaggaggatgccagaaacggtcgttttcgatcatcggtgatttccaaaatggaaagcgcgtctcgctctcagtgtacctgggcgaattcttcgatatccacctgtttgtgaacggtaccgtgacccagggagatcaacgcgtgtccatgccgtatgcctcaaagggactgtacctcgaaaccgaagcgggatactacaagctcagcggggaggcatacggatttgtcgctagaatcgatggctccggaaatttccaagtgctgctctccgatagatactttaacaagacgtgtggtttgtgtggcaatttcaatatcttcgcagaagatgatttcatgacccaagagggaactctgacctccgacccctacgacttcgctaactcctgggccttgtcctcgggtgagcaatggtgcgaaagggcatccccgccgtcaagctcctgtaatatctcgtccggtgaaatgcagaagggactctgggaacagtgtcagctgttgaagagcacttccgtctttgccaggtgccacccgctggtcgacccggagccgtttgttgcgctgtgtgaaaagacgctctgcgaatgcgccggaggactcgaatgtgcatgccctgctctgctggaatacgcccggacctgcgcccaggagggaatggtgctgtacggctggaccgaccactcagcatgctccccggtgtgcccagccgggatggaatatcgccagtgcgtttccccgtgtgccagaacttgtcaaagcctccacatcaacgaaatgtgccaggaacgatgcgttgacgggtgcagctgccccgagggacagcttctggacgaaggcctgtgcgtggagtcgactgagtgtccttgtgtgcactccggcaagcgctacccacctgggacttcactgtcccgcgattgcaatacctgcatctgcagaaattcacagtggatttgcagcaatgaggagtgtccgggggaatgcttggtcaccgggcaaagccacttcaagtccttcgataaccggtatttcaccttttctggtatctgtcagtaccttctggccagggactgccaagatcactccttcagcattgtcatcgaaaccgtccaatgcgcagacgatcgcgacgccgtctgcactcggtcggtgactgtgagactgccaggactccataattctttggtgaagctcaaacacggagcaggagtcgcgatggacgggcaggatgtgcagttgccgcttctgaagggagacttgagaatccagcataccgtgactgcgtcagtccggctcagctacggagaagatctgcagatggactgggacgggcgggggagactccttgttaagctctcgccggtctatgccggtaaaacgtgcggactctgcggtaactacaacggtaatcagggagatgacttccttaccccaagcggcctggcggagccgcgggtggaagattttggaaacgcgtggaagttgcacggagactgtcaggaccttcaaaaacagcattcagatccgtgcgcattgaacccccgcatgacgcgcttctcagaagaagcctgcgcagtgcttacgtctccgaccttcgaagcatgccacagagccgtgtccccgctcccatatctccgcaattgtcggtatgacgtgtgctcgtgctccgacggacgggagtgcctgtgcggcgcactggcgtcctatgccgcagcctgtgctggcaggggcgtgcgcgtggcatggagggagccaggacggtgcgaactgaactgcccaaagggtcaagtttacctgcagtgtggaactccgtgcaatcttacttgtagaagcctgtcgtaccctgatgaggaatgcaatgaggcctgccttgagggatgcttctgcccgccaggtttgtacatggatgaacggggggactgcgtccctaaagcccaatgcccatgctactacgacggagagattttccagccagaggatatcttctcagatcaccataccatgtgctactgtgaggatggctttatgcactgcacgatgtccggcgtcccgggctccctgctgccggacgcagtgctctcgtcaccgctgagccaccgctccaagcggtccctctcctgccggcctccaatggtcaagctcgtttgcccggcggacaacctgcgcgcagagggcctcgaatgcaccaaaacgtgccaaaactacgatctggagtgcatgtctatgggctgcgtcagcggatgcctgtgcccgcccggaatggtccggcacgaaaaccggtgtgtcgccctggaacgttgcccttgctttcaccaaggaaaggaatacgccccaggcgagactgtcaagatcggctgcaatacttgcgtgtgtcaggacagaaagtggaactgtaccgatcacgtgtgtgatgcaacctgctcgaccatcggtatggcgcactacctcactttcgacggactgaagtaccttttccctggtgaatgccagtacgtgctggtgcaggactactgcggatcgaatcccgggacgttccgcatcctcgtggggaacaaaggatgctcacatccgtcagtgaagtgtaagaagagagtgaccattctggtggaaggtggcgaaattgaactgttcgatggcgaggtgaacgtgaaaaggccgatgaaggacgagactcacttcgaggtggtggagtcggggcgctacatcatcctgctcctcgggaaagcactgtcggtggtgtgggaccgccatctgtctatctcggtggtgctcaaacaaacctaccaagagaaggtttgtggcctttgcggcaattttgacgggatccagaataacgacctgacctcctcgaaccttcaagtggaggaagatccagtggatttcggaaatagctggaaggtgagctcccagtgcgcggatacgagaaaggtgccactcgactcgtcaccagcaacttgccataacaacattatgaagcaaactatggttgatagcagctgcaggatcctgaccagcgacgtgttccaagactgtaacaaacttgtcgaccctgagccgtacctggacgtgtgtatttacgacacttgtagctgtgagtcgatcggagactgcgcctgtttctgcgatactatcgcggcctacgcccatgtgtgcgcccagcacggtaaggtggtcacttggcgcaccgcgaccctttgcccccaaagctgcgaagaacgcaatctccgggaaaacgggtacgaatgcgagtggcgctacaattcatgcgccccagcatgccaggtgacttgccagcaccctgaaccgcttgcctgccctgtgcaatgcgtggaaggatgccatgcccactgtcctccgggaaagatcctggatgagctgcttcagacctgcgtggatccggaagattgtcccgtctgcgaagtggccgggaggcggttcgcttcgggaaagaaggtgaccctgaacccttcggatccggaacattgtcaaatctgtcactgcgacgtggtgaacctgacgtgtgaagcgtgccaggaacccggggggctggtcgtccctccaaccgatgcacctgtgtcacccaccactttgtacgtcgaagatatctccgagcctcccctccatgacttctactgcagcagactcttggacctcgtgttcctgctggatggatcctccagactctcagaggcggagttcgaagtgctgaaggcgtttgtcgtggacatgatggagcgcttgcggatctcccagaaatgggtgcgcgtcgccgtggtggaataccatgacggatcccatgcctacatcggtctgaaggaccggaagcgcccttccgagcttcggcggatcgcttcgcaagtcaaatacgcaggttcgcaagttgcctccactagcgaggtgctgaagtacaccctgttccagattttctcaaagattgatcgcccggaggcttcgcgcattactctcctgctcatggcatcccaggaacctcagagaatgtcgcggaacttcgtccgctacgtgcaggggctcaagaagaaaaaggtgatcgtgatccctgtcggaatcggtcctcacgccaatctgaagcagattagactgatcgagaaacaggctccggagaataaggcgttcgtgttgtcgtcagtggacgagctcgaacagcagagggacgagatcgtcagctatctgtgcgatcttgcacctgaggcccctccaccaaccctgcctccagatatggcgcaggtgactgtgggtcccggactgttgggagtctcgactttgggaccgaaaagaaattctatggtcctggacgtggcctttgttctggaagggtccgataagatcggagaggccgatttcaaccgcagcaaggagtttatggaggaagtcatccaaagaatggatgtgggtcaggactccatccatgtgaccgtgttgcagtactcgtacatggtgaccgtggagtacccattttccgaggcgcagtccaaaggcgacatccttcagagagtgcgggagattagataccaaggaggaaatagaacgaacaccgggctcgcccttaggtacctgtctgatcatagcttcctcgtgagccaaggcgacagggagcaggcccctaacctggtctacatggtcaccggaaatccggcgtcggatgagattaagcggctgcctggcgacatccaagtggtccccatcggcgtgggacccaacgctaacgtccaggagctggaaagaattggttggccaaacgctccgatcctgatccaggacttcgaaaccctcccaagagaggctccggatctggtgctgcagcgctgttgttcaggagaaggactccagatccccactctgtcccccgctccagactgctcgcaaccactggacgtgatcctgctcctggacggttcatcctcattcccggcatcgtacttcgatgagatgaagtcattcgcgaaggccttcatctcgaaggccaacatcgggccaagactgacccaagtctctgtgcttcaatacgggtcgatcactaccatcgatgtgccgtggaatgtggtgccggagaaggcccacctgttgtcactcgtcgacgtgatgcaacgcgagggcgggcctagccagattggagacgcccttggatttgcagtccgctacctcacttcggaaatgcatggagctagaccgggagcctccaaagctgtggtcatcttggtgactgacgtgtcagtcgacagcgtggacgctgcggccgacgccgctcggtccaaccgcgtgaccgtctttccgattggcatcggcgacagatacgacgcggcacagctccgcattctggcagggcccgctggggactccaacgtggtgaagctccagcgaatcgaggacctcccgactatggtgactcttggaaatagcttcctgcacaaactctgcagcggcttcgtgagaatctgcatggatgaagatggcaacgagaagcgcccaggtgacgtgtggactcttccggatcagtgccatactgtgacctgtcagccagatggccagacccttctgaagtcccaccgcgtcaactgtgacaggggactgcgaccctcttgcccgaacagccagtcgcctgtcaaagttgaggaaacttgcggatgccggtggacctgcccatgcgtctgcactggatcctccacccggcatatcgtcacgtttgacggccagaacttcaagctcactggatcgtgcagctacgtgctgttccaaaacaaagaacaggatttggaagtgatcctccataacggagcgtgctcacctggcgctcggcaaggatgcatgaagtcgatagaagtgaagcattccgccctgtccgttgaactgcacagcgacatggaggtcaccgtgaacgggcgcctggtgagcgtgccgtatgtgggcggaaacatggaagtgaacgtctacggcgcaatcatgcatgaagtgcggttcaatcacctgggacacatctttacttttaccccgcagaataacgaatttcagcttcaactgtcgcctaagactttcgcctccaagacctacggtttgtgcggcatatgcgacgagaacggggcgaatgatttcatgctgagggacggaaccgtgacgactgattggaaaaccctggtccaggagtggactgtgcagcgcccgggacaaacttgtcagccaatcctcgaagagcagtgcctggtcccagactcttcacattgccaggttctgctgcttcctctcttcgctgaatgccacaaggttctggcgccagcaaccttctacgctatctgccagcaagattcctgccaccaggaacaagtttgtgaagtgatcgcatcgtacgctcatctctgcagaactaacggcgtgtgcgttgattggaggaccccggatttctgcgcaatgtcatgcccgccatccctggtctacaaccattgtgaacacggatgccctcgccactgcgacggaaacgtgtcgtcgtgcggggaccacccgtcggaaggctgcttctgccctccggacaaagtgatgctcgagggatcctgcgttcccgaggaggcctgcactcagtgcattggagaggacggcgtccagcatcagttccttgaggcttgggtcccagatcaccaaccgtgccaaatctgtacctgtctgtccggccgcaaagtcaattgtactacgcagccttgtccaaccgcgaaagcgccgacctgcggcctgtgtgaggtggctcggcttagacagaacgctgatcagtgctgtccggagtatgagtgcgtttgcgacccggtgtcgtgcgatctcccgcctgtgccgcactgtgaacgcggactgcaaccgactttgaccaacccgggagaatgccgccccaacttcacttgcgcttgcagaaaggaggagtgtaagcgggtgtcgccgccgagctgtccaccacaccgcctgccgaccctgcgcaagactcagtgttgcgacgagtatgagtgtgcgtgtaactgcgtcaattccacggtttcgtgcccactcggctacctggcctcaacggctactaacgattgtggctgtactaccaccacttgcctgcccgacaaggtgtgtgtccatcgctccaccatttacccagtcgggcaattctgggaggagggatgtgacgtttgcacgtgcaccgatatggaagatgccgtcatgggactgagggtcgctcagtgttcgcagaaaccatgtgaggactcctgccgctcaggattcacttatgtgctgcacgagggagaatgctgcggtagatgccttccttcggcgtgcgaagtggtgaccggaagcccgagaggcgatagccaaagctcgtggaaatccgtcggctctcaatgggcctccccggaaaatccgtgccttatcaacgaatgtgtgcgggtcaaagaagaagtgttcatccaacagcggaacgtgtcatgtccgcagctggaagtgcccgtgtgcccatcgggttttcagctgtcatgcaagacctccgcatgttgccctagctgccggtgcgaacgcatggaggcatgcatgctgaacggcaccgtcattggaccgggcaagactgtgatgattgacgtgtgtaccacctgtcggtgcatggtgcaagtcggcgtgatctctggtttcaagctggagtgccgcaagaccacgtgcaatccatgtccgcttgggtacaaagaagaaaacaacaccggagaatgttgcggtcgctgcctgccaactgcctgtaccatacagttgcgagggggacagatcatgactctcaagagagatgaaacgctgcaagatggctgcgacactcacttctgtaaagtgaacgaacgcggcgagtacttttgggagaaacgcgtgactggctgtccacctttcgacgagcataaatgcttggcagaaggaggcaaaatcatgaagatcccgggaacctgctgcgacacttgcgaagagccggagtgcaacgacattacggcccgtctgcaatacgtgaaggtgggttcgtgcaagtcagaagtcgaagtcgacatccattactgccagggaaaatgtgcgtcgaaggccatgtacagcatcgacatcaacgacgtccaggatcaatgctcgtgctgcagcccgaccaggacggaacctatgcaagtcgccctgcactgcaccaacgggagcgtggtctatcacgaggtcctgaacgcgatggaatgcaaatgttcgccacggaaatgcagcaag

SEQ ID NO: 21348 - DNA, 8439 bp, synthetic construct
  misc_feature 1..8439: note = source = /note="Description of Artificial Sequence: Synthetic coding sequence"
  source 1..8439: mol_type = other DNA
atgattccagctcggtttgccggcgtgctgcttgcgctggcattgattctgccggggactctctgcgcagaaggcacccgaggtcgtagctcaaccgctaggtgcagtttgttcggttccgactttgtgaacaccttcgacgggtcgatgtattctttcgccggatattgctcctacctattggctggtggctgccagaaaaggtcctttagcataataggtgacttccaaaacgggaagagggtgagcctgtccgtgtatcttggtgagtttttcgatatacatctattcgtaaacggcactgtgacacaaggggaccagagggttagcatgccctatgcgtcaaaagggctgtatctggagaccgaagcaggttactacaaactgtctggcgaagcctatgggtttgtagctcgaatagacggatccggaaattttcaggttttactaagtgaccggtacttcaacaaaacctgcggattgtgtgggaactttaatatctttgcagaggacgacttcatgacccaggaggggaccttgaccagcgatccatacgatttcgctaactcttgggcactcagctccggggagcagtggtgtgagcgggcaagccccccgtcttccagctgtaatatttcgtcgggggaaatgcagaaaggtttatgggagcagtgccagttgctgaaatcgaccagtgtgttcgcacgatgtcaccccttggtggacccagaacctttcgtcgccctgtgtgagaaaaccctatgcgagtgtgccggtggtctcgaatgtgcctgtcctgcgttgctggagtacgcaagaacatgcgctcaggagggaatggtgctatacggctggactgatcattcagcgtgctcacccgtgtgtcccgcagggatggagtaccgccagtgtgtgtccccatgcgcgagaacctgccaatctctgcatattaacgagatgtgtcaggagcgttgcgtggacggctgtagttgtcctgaaggtcaactgcttgatgaaggtctgtgcgtggagtccacagagtgtccctgtgtccatagtggaaaaaggtatcctcctggcacctccctttccagagattgcaacacctgcatctgccggaactcccaatggatctgttccaatgaggagtgtccaggcgagtgccttgtcaccggccagtcgcactttaagtctttcgataatcgttattttaccttttccggaatctgccagtacctcctggcaagggattgtcaagatcacagcttcagtatagtgatagagacggtccagtgcgcagatgacagggacgctgtgtgtacaaggagcgtgacagtcaggctcccaggactgcacaattcactggtcaaactgaaacatggggcaggagtggcaatggacggacaagacgtgcaattacccctattaaagggggacctaagaatccagcataccgttacagcttccgtccgcctatcctacggggaagacctgcagatggattgggatgggagaggtcgactcttggttaaactgtccccagtgtatgccgggaagacctgcgggctgtgcgggaactataatggcaaccagggggacgatttcctgactcccagcgggttggccgaacctcgtgtggaggatttcgggaacgcatggaaactgcatggagactgccaagatttgcagaaacaacactcagatccctgtgcactgaatcccagaatgacacggttttcagaggaggcttgcgcagtgctgacgtcaccaacttttgaagcgtgccatcgcgccgtgagcccactgccttatcttaggaactgtcgctacgacgtgtgttcatgctcggacggacgcgagtgtttgtgtggagcactggcatcctatgctgcggcctgtgctggccgaggcgtgcgggtggcttggcgagagccaggcaggtgcgagctcaactgtcccaaagggcaggtgtacttgcagtgcgggacaccctgcaatctcacctgcagatctctgtcttaccctgacgaggaatgcaacgaggcttgtctggagggatgtttctgcccacccggcctgtatatggacgagcgaggcgactgtgtcccaaaggcacagtgtccctgctattacgatggcgagatctttcagccagaggacatatttagcgaccatcataccatgtgttactgtgaggatgggtttatgcattgcaccatgtctggtgtccctggatctctcctccccgatgccgtcctgagtagcccactaagccaccgatcaaagcgcagtctgagctgtaggccacccatggtgaagctggtgtgtcccgctgataatcttcgggctgagggtcttgagtgcaccaagacatgccagaattacgacctggagtgcatgtccatgggatgcgtgagcggctgcctctgtccccccggaatggtccgacatgagaacaggtgtgtggcattggagagatgcccctgcttccatcaggggaaagagtatgccccgggagaaacagtgaaaattgggtgtaacacctgtgtatgtcaggaccgcaagtggaactgcacagaccacgtgtgtgacgctacatgttccacaattggaatggcccattatctgacctttgacggcctcaagtatttattccccggcgaatgccaatatgtactggttcaggactattgtggaagcaatcctggaacgtttagaatcctcgtagggaacaaaggttgtagccatcccagcgtcaagtgcaagaaaagagtgactattctcgtagagggaggcgagatcgagctgtttgatggagaggtcaatgtcaagcggccgatgaaggatgaaacccacttcgaggtggttgaatctggacgttatattattctgctcctgggcaaagcactttcagtggtgtgggataggcatctctcgatcagcgtcgtgttgaagcagacctaccaagaaaaagtgtgcggattgtgtggaaactttgatggaattcagaataacgatctaacctccagcaacctacaggtagaggaagaccccgtcgacttcgggaatagctggaaagtgagctcacagtgcgccgacactaggaaagtacctctggacagttcacccgctacctgtcataacaatatcatgaagcagaccatggtggactccagttgccgcatcctaaccagtgatgttttccaggactgcaacaagctggttgaccctgagccgtacctggatgtgtgcatatacgacacttgctcttgcgagtcgattggggactgcgcatgcttctgtgatactatagccgcttatgctcacgtttgtgctcagcacgggaaggtcgtgacatggcggactgccacactgtgcccccagtcttgcgaggagcggaacttaagagaaaacgggtatgagtgcgagtggagatataactcttgtgcacccgcctgccaggtcacctgccagcatccagaacctctggcgtgccctgttcagtgtgtggagggatgccacgcgcattgtccaccaggcaaaatacttgatgagctgttgcagacttgcgtggatcccgaggactgtcccgtatgcgaggttgctggaagacgattcgcatctggcaaaaaggtaactctgaatccttctgaccctgagcactgccagatttgccactgtgatgtcgtgaaccttacctgtgaagcttgccaggaacctggagggcttgttgttccacccacagacgccccagtgtcccctaccacactgtacgtggaggatatatccgaacctccgctccacgatttctattgtagtagacttctggatttggttttcctcctcgatggtagcagtcgattaagtgaagccgagttcgaggtcctgaaagcctttgtagtggatatgatggagagactgcgtatttcacagaagtgggtaagggtcgctgtagtagaataccatgatgggtcacatgcttacatcggactgaaggatcgtaagagaccctctgagctcagaaggatagcctcacaggtgaagtacgccggcagtcaagttgcaagcacctcagaagtgctgaaatacacactcttccaaatcttcagtaagatcgatagacccgaggctagcagaatcacattacttttgatggcgtcccaagagccacagaggatgtcccgcaatttcgtgaggtatgtccagggtctcaaaaaaaaaaaagtcatcgtcattcctgttggcataggcccccatgcgaatcttaagcagatcagacttattgaaaagcaggccccagaaaataaagcgttcgtgttatcatccgttgacgagctcgagcagcagcgggatgaaattgtatcctacttgtgcgatcttgccccagaggctcctcctccgaccctgccgccagacatggcacaagtcacagtgggccccgggcttctgggtgtgtccaccctgggaccaaaacgaaactctatggtgcttgacgtagctttcgtgctagaaggcagtgataaaatcggggaggcggacttcaatagatccaaggaatttatggaagaggtgatccaacggatggacgtgggtcaagactccatccatgtaaccgtcctccaatactcttatatggtcactgttgaatacccattcagtgaagcacagtcaaaaggggatatacttcagcgcgtgcgggaaattcgttaccaaggaggcaatcgcacaaataccggacttgcgctgcggtacctaagcgaccacagcttcctggtttcacagggagatagggagcaggcaccaaatctggtttatatggtcaccggcaaccctgcttccgacgagattaagaggcttcccggcgatatccaagtggtgcctatcggtgtaggccctaatgcaaacgtgcaggagctggagaggattggctggcccaacgcccccatcttaattcaggatttcgagacactgccccgcgaggcaccagatctcgttcttcaacgatgctgctcaggcgaaggcctccagatcccaacgctgtcaccagcgcccgactgctcccagcctctcgatgtcattctcctgctagatggaagctcaagttttcccgcatcatattttgacgagatgaagtcgttcgctaaggcctttatctccaaggcaaacatcggaccacgcttaacccaggtgtccgtgctgcagtacggttccatcacgacaatcgatgtcccatggaacgtcgttcccgagaaagcacatttgcttagcttagttgacgtgatgcaacgggagggcggtccctcccagattggagatgcactgggattcgccgtgcggtacctaaccagtgagatgcacggcgcaaggccaggcgcctccaaagccgtggtcatcctcgtgaccgacgtgtccgtggactccgtcgatgcagccgccgacgcagccagaagtaaccgggtgaccgtgtttccgatcgggataggtgatcggtacgatgcggcgcagcttaggattctcgcgggcccagctggtgattctaacgtcgtgaagctacagcgtatcgaggaccttccaacgatggtgactctgggcaatagtttcctgcataagctgtgcagcggcttcgtcaggatttgtatggacgaggacggaaacgagaagcggcccggcgacgtctggacattgcccgatcagtgccatacagtgacatgccagcccgatggccaaacactgcttaaatctcatagggtgaactgcgaccggggcctgcgacccagctgtcctaatagccagagccctgttaaagttgaagagacctgtgggtgccggtggacatgcccctgcgtgtgcacgggttcctccactagacacatcgtgacatttgacgggcagaacttcaagctgaccggaagctgcagttacgtgttattccaaaataaagaacaggatctcgaagttatacttcataatggagcctgcagcccgggagcccgccaggggtgtatgaaaagcattgaagttaaacatagtgcactgtctgtcgagttgcacagcgacatggaagtgaccgttaacgggcgcctcgtgtccgtgccatacgtgggagggaacatggaggttaatgtttatggggcaatcatgcatgaggtccggttcaatcacttagggcacatttttacctttacccctcagaataacgaatttcagttacagctcagccccaaaacttttgcgagtaaaacgtatggactgtgcggaatttgtgacgagaatggggcaaacgactttatgctgagggacgggacggtgactacagattggaagaccctggtccaagagtggacggtccagcgaccagggcagacatgtcagcccatcttggaggaacaatgtctggtgccagattcctcacactgccaagtgctgctgctcccccttttcgccgagtgccacaaggtccttgcacccgcaacgttttatgccatttgccagcaggacagctgccaccaggagcaggtgtgtgaagtgatcgcctcctacgcccatctgtgcagaacaaacggagtgtgcgtagattggaggactcctgatttttgcgctatgtcttgtcccccaagtttggtgtataatcactgcgaacacggttgcccgagacactgcgatggaaatgtctcctcctgtggggaccatccatccgagggttgcttctgtcctccagacaaagtaatgttagagggatcctgtgtgcctgaagaggcatgcacccaatgcattggagaagacggggtccagcaccagtttctggaggcttgggtgccggaccaccagccttgccagatctgcacatgtctgtcggggcggaaagtcaattgtactacacagccttgtcccacagcaaaggccccaacttgtggcctgtgtgaagtagcgcgtcttagacagaatgccgaccagtgttgcccggagtacgagtgcgtatgcgatccggtttcatgcgatctgccaccagttccgcactgtgagcggggcctccaacccaccctgaccaatccaggcgagtgccgtcccaatttcacctgcgcttgccggaaggaggaatgcaagcgagttagccctccgagctgcccaccacatcgcttgccaaccctacgcaaaacccagtgctgcgatgagtacgaatgcgcctgcaactgcgttaatagtacggtctcatgccccctggggtacctcgctagcacggcaactaatgattgcggctgtactacgacgacttgcctcccagataaggtttgcgtacaccgctccaccatctaccctgtaggccagttctgggaagaaggctgtgacgtgtgtacatgcactgacatggaggatgccgtgatggggttaagggtagcgcaatgctcccagaaaccttgtgaagactcctgcagaagtggatttacttacgtactccacgagggcgaatgttgcgggcgttgtctgccctccgcctgtgaggtggtaacaggctccccgcgcggggatagtcagagctcttggaagagcgttggaagccaatgggccagcccagagaatccctgtctcattaatgaatgtgtcagggtgaaagaggaagtattcattcagcagcgcaatgtctcgtgtcctcagctggaggtgccggtgtgcccctccggctttcagctgtcttgtaaaacctcggcttgctgtccatcctgccggtgcgagagaatggaggcatgcatgctgaatggcaccgtgattggtcctgggaagacagtgatgatcgacgtctgcactacatgcagatgtatggttcaagtgggcgtgatatctgggttcaaactggagtgccgcaaaacaacatgcaatccctgtccgctgggctataaggaagagaacaacactggagaatgctgtggcaggtgcctcccgacagcgtgtacaatacagctcaggggcgggcaaataatgaccctcaagcgagacgagaccctccaggacggctgcgacacccatttttgcaaggtcaatgaaagaggagagtacttctgggagaagcgtgtgacagggtgccctccgttcgatgagcataaatgcctcgctgaaggggggaaaattatgaagataccagggacgtgttgtgatacatgtgaggaaccagagtgtaatgacatcacagctcgtttacaatacgtgaaagtgggttcatgcaagtcggaggtagaggtggatatccattactgtcaaggtaagtgcgcaagcaaggcaatgtactccattgacatcaacgatgtgcaggatcagtgtagttgctgttctcccaccagaaccgagcctatgcaggtggccctccactgtacaaacggctctgtggtgtaccacgaagtcctcaatgcaatggaatgcaaatgctctccccggaagtgctcaaag

SEQ ID NO: 21349 - DNA, 8439 bp, synthetic construct
  misc_feature 1..8439: note = source = /note="Description of Artificial Sequence: Synthetic coding sequence"
  source 1..8439: mol_type = other DNA
atgatcccagcccggtttgccggagtcctgttggcgctggccctgattctgcctggcactctttgcgccgaaggaacccggggaagatcctcgactgcacgatgttcactgtttggttcagacttcgttaacaccttcgatggctcgatgtactcatttgcaggctactgttcctacttgcttgcaggaggctgccagaagagatcgttttcgattattggtgacttccaaaatggcaagcgtgttagcttgtccgtatacctcggagagtttttcgatattcatctttttgtcaacggtaccgtgacgcagggggatcaacgtgtttccatgccatacgcatccaagggcctgtacctcgagactgaagcaggatactacaaactttcgggagaagcatacgggtttgttgctcgaattgatggctcgggcaattttcaggtgcttctgtcagatcgctacttcaacaaaacctgcgggctgtgtggtaatttcaacatctttgctgaggacgacttcatgactcaggaaggtactcttactagcgatccatacgatttcgcaaactcgtgggcactttcatcgggcgaacaatggtgcgagagggcatcacctccatcgtcctcgtgtaacatatcttccggcgaaatgcagaaaggtctttgggaacaatgtcaactgcttaagtccacttcagtgttcgcgcgctgccatcctttggtggatccagagccttttgtggcactttgtgaaaagaccttgtgtgaatgtgcaggagggctcgagtgtgcgtgcccagcccttttggagtacgctcgcacttgtgctcaggagggaatggtgctctacggatggaccgatcattcggcctgttcgcctgtgtgtccagcaggtatggaataccggcaatgcgtgtcaccatgtgcaaggacctgtcaaagcctccatatcaacgaaatgtgtcaagaaagatgcgtcgatggctgctcgtgcccggaaggccaactgcttgatgaaggactgtgtgtggaatccactgagtgcccatgtgtacactcgggtaagcggtacccgccaggtacttcacttagccgcgattgtaatacctgtatctgccgcaactcacagtggatctgcagcaacgaagaatgccccggagagtgtctcgtcactgggcaaagccacttcaagtcatttgacaaccgttacttcaccttctcaggcatttgtcaatacttgcttgcgcgtgattgtcaagatcactcgtttagcattgtcatagaaactgttcagtgtgccgacgatcgagatgccgtgtgtactaggtcggttaccgtgagactcccgggactgcataatagccttgtgaaactgaagcatggcgcgggagtcgctatggacggacaggatgtccaactgcctctgcttaagggggatcttagaattcagcacactgtgaccgcctcggtgcgcctgtcgtacggggaggacctgcagatggactgggatggacgtggacgcctgctcgttaagctctcccccgtgtacgcggggaaaacttgtggcctttgcggcaactataatggtaaccaaggggacgattttcttactccctcaggtcttgcagaaccaagagtggaggactttggtaatgcgtggaaacttcacggcgactgccaggatctgcaaaaacaacattccgatccttgtgcactgaaccccagaatgacgagattctcagaggaggcatgtgccgtccttacctctccaacctttgaagcatgccatagagcagtcagcccgctcccctacctgcggaattgcaggtacgatgtctgtagctgttccgatggaagagaatgcctttgcggagccctggcatcgtacgctgcagcatgcgcgggtcgcggagtccgggtggcgtggcgcgaacctggacggtgtgaactgaattgtccaaagggccaggtgtacctgcaatgtggaacgccttgcaatctcacttgcaggagcctttcttaccctgatgaagaatgtaacgaggcatgtctcgagggatgtttctgtcctcccgggctgtacatggatgaacgcggagattgcgtgccgaaagcacagtgtccatgttactacgatggtgagatttttcaacctgaggacatcttttcagatcaccataccatgtgttactgtgaggatggtttcatgcattgtactatgtctggtgtccctggatcgcttctgcctgacgcagtgctgagttcgccactgagccatagatccaagagatcgctgtcatgtcgccccccgatggtgaaacttgtgtgtcctgctgataaccttagagcagagggcctcgaatgcaccaagacctgccaaaactacgatctggagtgcatgtccatgggatgtgtgtcagggtgtctctgtccccccggtatggtccggcacgagaatagatgtgtcgccctggagaggtgtccttgtttccatcagggaaaggaatacgccccaggagaaactgtgaaaattggatgtaacacttgtgtgtgtcaagatagaaagtggaactgtaccgatcacgtgtgtgacgcaacgtgtagcactattggtatggcccattacctgacttttgacggtctgaagtacctgtttcccggggaatgtcagtacgttctggtgcaggattactgtggtagcaacccaggtacctttagaatactggtgggaaataaggggtgttcccatccctccgttaagtgtaagaagcgggtcactatccttgtggaaggaggggagatcgaactgtttgatggggaggtgaacgtcaaaagaccaatgaaggacgagactcattttgaagtggtggaatccggacgatacattattctgctcctggggaaagcactgtccgtggtctgggatagacatctgtccatctcggtggtgctgaagcaaacgtaccaggaaaaagtctgcggtctgtgcggaaactttgatggcattcagaacaacgacctcacttccagcaatcttcaagttgaagaggacccagtggatttcggaaattcctggaaggtgtccagtcaatgcgcagatacccgtaaggtgccattggatagcagccccgccacctgccataacaacattatgaaacaaactatggtggactcttcctgtcggatcctgacctccgacgtatttcaggactgcaataaacttgtcgatcccgagccctaccttgacgtgtgcatttatgacacctgttcttgtgaatccatcggggactgtgcatgcttttgcgataccattgcagcatacgcacatgtgtgtgcacaacatggtaaggtagttacgtggcgtacggcaaccctttgtccccaatcgtgtgaggagaggaaccttcgagaaaacggttacgaatgcgaatggcgctacaattcatgtgctcctgcatgccaggtcacctgtcagcatcctgagcctctggcatgccctgtccaatgcgtggaagggtgccacgcccactgtccacctggaaaaatcttggatgagcttctccagacctgcgtcgatccagaggattgtccagtctgtgaagtggccggtcgaagatttgcctccgggaagaaggtgactctgaatccatctgatccggaacattgtcaaatatgtcactgtgatgtggtcaatcttacttgcgaagcatgccaagaacccggcggattggttgtccccccaaccgatgctccggtatccccaactactttgtacgtggaggatatcagcgagccccctctccatgatttctattgtagccggctgttggatctcgtttttctgcttgacggatcttcgcggctcagcgaagcagaattcgaggtgcttaaggcatttgtggttgacatgatggaaagacttcgcatttcacagaagtgggtcagagtcgcagtggtggaatatcacgacggatcccacgcatacatcggcctgaaggatagaaagcggccctcggaactgcggcgcattgcctcccaggtgaagtacgcaggttcccaggtggcatccacctctgaagtgcttaagtacacccttttccaaatcttttcaaagattgatagacctgaggcgtcacgaataactcttctgctgatggcatcccaggaaccacaacggatgagccggaactttgtgcgctatgtgcagggtcttaagaagaaaaaagtgatagtgattcctgtcgggatcggaccacatgccaaccttaaacaaattcggctgattgaaaagcaggcacccgaaaacaaggccttcgtcctgagctccgtcgatgagcttgagcagcaacgggatgaaattgtgtcttacctctgtgatctggctcccgaagcaccaccacctacgctgccccctgatatggcacaagtgaccgtcggacccgggctgctgggggtttcaaccttgggtccaaagcgcaactccatggtgctcgatgtggcatttgtgctcgaaggatccgataagattggtgaagccgactttaatcggagcaaggaattcatggaagaagtgatccaaagaatggacgtgggccaagactcaatccatgtcactgtgctgcaatattcgtacatggtgactgtcgaatacccattctcggaggctcagagcaagggggatatactccagagagtgagggaaattcgctaccagggaggtaacaggacgaacactggacttgcattgaggtacctttcagatcattcgtttctggtgagccaaggtgatagagaacaagctccaaacctcgtgtacatggtcactggaaatcccgcatcggacgagattaagagacttcctggagacatacaagtggtcccaatcggcgtaggcccaaatgcaaacgtccaagagctcgaacggattggttggcctaatgcacctattctcatacaagacttcgaaactctgccgcgggaagcgccagacctcgtgttgcaacgttgctgcagcggtgaaggcctccagatcccgactctttcaccagctccagattgtagccaacctctggacgtgatcctgctcctggacggatcgtcctcctttcctgcatcatactttgatgaaatgaagagctttgcaaaagcatttatcagcaaggccaacatcggcccgcgcctgacccaagtgtcagtgctgcaatacggatcgattactactatcgatgtgccgtggaacgtggtccctgagaaggcacatcttctctcgcttgtggacgttatgcagagagagggaggaccatcgcaaattggagatgcactgggtttcgccgtgcggtacctcacttcagaaatgcatggcgccagacccggagcgtcaaaggcggtggtcattctggtcaccgacgtgtccgttgactccgtcgacgcagcagctgacgccgcaagatccaatcgagtgacggtgtttcccatcggtatcggggatcgctacgacgcagcccaacttcgcattctcgcaggccctgccggtgattccaacgtggttaagctccaacgaatagaagatctgcctactatggtgacgcttggtaattccttcctgcacaagctctgtagcggcttcgtgcgaatctgtatggatgaagatggtaatgaaaaaagacctggggacgtgtggacgcttcctgaccagtgccatacggtgacttgccagccagatggtcagactttgctgaagagccacagggtcaactgcgaccggggacttagacccagctgtcctaactcccaatcacctgtgaaggtcgaggaaacttgcggatgtcgctggacgtgtccttgcgtgtgtacgggatcctctacccgccacattgtgactttcgacggccagaactttaaactgaccggatcctgttcttatgtgctctttcagaacaaggaacaggatctggaagtgattctgcataacggagcatgttcacctggtgctagacagggatgcatgaaaagcattgaagtcaagcattcggcacttagcgtggagcttcattccgatatggaagtgaccgtgaacgggagactggtgtccgtcccttacgtgggaggaaatatggaagttaatgtatacggagcgattatgcatgaagtgcggtttaaccacctgggtcacattttcaccttcacccctcaaaacaacgaatttcagcttcaattgagccctaaaaccttcgcttcgaaaacctacgggctttgcggtatctgcgatgaaaacggagcgaatgactttatgctgcgcgatgggacggtgaccacggattggaaaaccctcgtgcaagaatggactgttcagcgaccaggacagacttgtcagcccatccttgaggaacagtgtctggtgccagatagctcccactgccaagtgctcctgctccctctctttgcagagtgtcataaagtgcttgccccggcaactttctatgcgatctgtcagcaggactcgtgccaccaagagcaggtgtgtgaagtgatagccagctacgcacatctgtgccgaacgaatggagtctgcgtggactggagaacccctgatttttgtgcaatgtcctgcccaccgagccttgtctataaccattgcgagcacggatgtccccgccattgtgatggcaacgtgtcgtcgtgcggggaccacccgtctgaaggttgtttctgtccccctgataaagtgatgcttgaagggtcgtgtgtgcctgaagaggcctgcacccaatgtattggtgaggatggggtccagcaccagtttcttgaggcatgggtcccggaccaccaaccttgtcagatctgtacctgtctctcgggaagaaaggtcaattgcactacccagccctgcccaaccgcgaaggcccccacttgtggtttgtgcgaagtggcaaggcttcgtcagaacgcggaccaatgttgccctgagtacgagtgcgtgtgtgatccagtgtcgtgtgatttgccccctgtaccacactgtgagagaggcctgcaacctactttgactaaccctggtgaatgccgaccgaactttacctgtgcctgccggaaggaagagtgtaaaagagtgagcccaccttcatgcccacctcaccgcctccccactctgcgcaagacccaatgttgcgatgagtacgaatgtgcgtgtaactgcgtgaattcaactgtcagctgtcctcttggatacctcgcctcgaccgccacgaacgattgtggttgtactaccaccacctgtctgccagataaggtctgtgtgcatcggtcgaccatatacccagtgggacaattttgggaggaaggttgcgatgtgtgtacttgtactgatatggaggatgcagtgatgggtcttagagtggcacaatgctcgcagaagccatgcgaagatagctgtagatccggctttacctacgttctgcatgaaggagaatgctgcggaaggtgcctgccttcggcatgtgaggtggtgaccgggtcgccgcggggagattcccaatcgagctggaagtcagttggatctcaatgggcctcgccagaaaacccatgcctgattaatgaatgtgtccgcgttaaggaagaggtgttcatccagcagaggaatgtgtcttgtcctcaactcgaagtccccgtgtgcccttctggttttcagctgtcgtgtaagacctccgcatgttgtccgtcctgccgatgtgaaaggatggaggcgtgtatgcttaacggaaccgtgatcggtcctggtaagactgtcatgattgacgtttgtaccacttgtcggtgcatggtccaagtcggagtgatttcgggattcaaacttgagtgcagaaagaccacctgcaacccttgcccactcggatacaaagaagaaaacaacaccggtgaatgttgtggcagatgtctgccgactgcatgtactatacagctccggggagggcaaatcatgactcttaaacgtgacgaaactcttcaagatggatgcgatacccatttttgcaaggtcaacgagcgaggcgagtacttttgggaaaaacgtgtgaccggttgtcctccctttgacgaacataagtgtctcgcagaaggtggcaagattatgaagatccctggcacctgttgcgacacctgtgaagaaccagaatgtaatgacataaccgcacgattgcagtacgtcaaagtgggtagctgtaagtcagaagtcgaagtggacattcattactgtcagggaaagtgtgcctccaaggcgatgtactccattgacattaatgatgttcaagaccaatgtagctgttgtagccctacccgcaccgagcctatgcaagtcgcgctccattgtactaacggatcggtagtgtaccacgaagtgctcaacgctatggaatgtaagtgtagtcctcgcaagtgttcaaag

SEQ ID NO: 21350 - DNA, 8439 bp, synthetic construct
  misc_feature 1..8439: note = source = /note="Description of Artificial Sequence: Synthetic coding sequence"
  source 1..8439: mol_type = other DNA
atgatcccggctaggttcgcaggtgtgctgctcgccctggcactcatactccccggtacgctctgcgcagaaggtacgagaggtagatcctcaaccgcaagatgcagcctttttgggtcggattttgtgaatacttttgatggatcgatgtacagttttgcaggatactgtagttacctgcttgctggtggttgtcagaaacgttcgttctccatcatcggagatttccagaacggaaagcgtgtgtccctttcggtgtaccttggagagtttttcgatatccatctctttgtcaacggaactgtcactcagggggatcagcgtgtgtcgatgccctatgcgtcgaaaggactttaccttgaaactgaggcgggttactacaaactgtccggggaagcatatgggtttgtggcccgcattgatggttccggtaactttcaagttcttttgtccgaccgctatttcaacaagacttgcggcctttgtggcaatttcaacattttcgcagaagatgacttcatgacccaagaaggcactctgaccagcgatccatacgatttcgcaaactcatgggcccttagctctggagagcagtggtgcgagagggcgtcacctccaagcagctcatgtaatatctccagcggcgaaatgcagaaggggctttgggagcagtgccaacttctcaagtcgacctcggtgtttgctagatgccatcctcttgtcgacccggagccctttgtggccctttgcgaaaaaactttgtgcgaatgcgccggtggcctggaatgtgcctgcccagctcttcttgagtacgcccgaacctgtgcgcaggaagggatggtgctgtacggctggacggatcatagcgcctgctcgccggtatgcccggccggaatggagtaccgacaatgtgtgagcccttgtgcccgtacctgtcagtcgctccacatcaacgaaatgtgtcaggagcgatgtgtcgatggatgttcttgtccagagggacagcttcttgacgaaggattgtgcgtcgaaagcaccgagtgcccttgcgttcactcgggcaagagataccctcctggtaccagcctttcacgggattgcaatacctgtatctgtcgtaactctcaatggatttgttccaatgaggagtgtccaggagagtgcttggtgactggacagagccactttaagtcctttgataatcgttactttaccttctccggaatctgtcaatacttgctcgcaagggactgccaagatcattccttttcgattgtcatcgaaaccgtgcaatgcgcagatgaccgagatgcagtgtgtacccggtcggtcactgtgagactccctggcctgcataactcattggtgaagctgaagcatggagcaggagtggcgatggacggacaggatgttcaattgcctctgcttaaaggggatctgcgcatccaacacactgtcacggcaagcgtgcggctctcgtacggcgaagatttgcagatggattgggacgggcgcggaaggctgctcgtgaagctgagccccgtgtatgcaggaaagacgtgcggactttgtggtaattacaacggcaatcaaggcgatgattttctcactccttccggactggcagaacctagggtcgaagatttcggaaacgcatggaagttgcacggagattgccaagatcttcaaaagcaacattcagatccatgtgcattgaaccctcgcatgacccgattcagcgaagaagcatgtgccgtcctgacttctcccaccttcgaggcgtgccatagggccgttagcccacttccttacctgcgcaattgccgttacgacgtgtgtagttgctcggatggaagggagtgcttgtgtggtgcactggcatcatacgcagcagcctgtgcaggaagaggtgtccgcgtggcatggcgagagccgggacggtgtgagttgaactgtcctaagggtcaggtctacctccaatgtggaaccccatgcaatctcacttgtcgatcgctctcatacccagatgaagaatgtaatgaggcgtgtcttgaagggtgcttttgtccaccaggtctgtacatggatgaaagaggcgactgtgtccctaaagctcagtgcccttgttactacgatggagagattttccagccggaggatatctttagcgatcatcacactatgtgttactgtgaggacggctttatgcattgtaccatgtccggagtcccaggttcgctgctccccgatgcagtcctctcctcccctctgtcacaccgcagcaaacggtccctttcgtgtcgaccgcccatggtgaaactcgtgtgtcctgcagataatctgagagcagaaggtcttgaatgtactaagacctgtcaaaactacgatctcgagtgcatgtcaatgggatgtgtgtccggatgcctctgccctccaggaatggtgcgccatgagaacaggtgcgtggctctggaacggtgtccttgctttcaccaaggaaaagaatacgcaccaggcgagacggtgaagatcggttgtaacacctgcgtgtgtcaagaccgtaaatggaactgtactgatcatgtgtgtgacgcaacctgttccaccattggtatggcgcattacctgaccttcgacggactcaaatacttgtttcctggcgagtgccagtacgtgctggtgcaggactactgcggaagcaatccaggcacctttagaatcctggtgggtaacaaaggatgttcgcacccctcggtgaagtgtaagaaaagggtgacgattcttgtggagggaggtgaaatagagcttttcgatggagaagtcaacgtcaagcggccaatgaaggatgaaacccatttcgaagtggttgagtcgggccggtacattattctgctgcttggaaaggcactttccgtggtgtgggatcgccacttgtccatctccgtcgtgctgaagcagacctaccaagagaaggtttgtggtctgtgcggtaactttgacggtatccaaaacaatgatttgacttcgtccaatctgcaagtggaagaagatcccgtcgattttggaaactcgtggaaggtttccagccaatgtgccgacaccaggaaggtgccccttgattcgagccctgctacctgccataacaacattatgaaacagaccatggttgactcgtcgtgtagaatactgacctccgatgtgttccaagactgtaacaaacttgtggaccctgaaccatacctggatgtctgtatctacgatacctgttcttgtgaaagcattggagattgtgcatgcttttgcgataccatcgccgcttacgcacacgtgtgtgctcagcatggcaaagtggtcacttggagaaccgccaccctttgcccacaatcgtgtgaagaacggaacctccgtgaaaacggctacgaatgtgagtggcgatacaatagctgcgcacctgcctgtcaagtcacgtgtcaacacccagaaccactcgcatgtccagtgcagtgcgtcgaaggatgtcatgcacattgtcctcctggcaagatacttgacgaacttctccagacctgtgtcgaccctgaagattgccctgtttgtgaggtggctggtaggagatttgcttcgggtaagaaggtcacccttaacccttcagatcctgaacactgtcagatttgtcactgtgatgtagtaaatctcacgtgtgaagcatgtcaggagccggggggactggtggtgcctccaaccgacgcacccgtgtccccaaccaccctctacgtcgaggacatttcggaaccacctcttcatgacttctattgttcccgtctgctggatttggtattcctgctggatggatcgagcagattgtcggaagcggaatttgaagtccttaaagccttcgtggtggacatgatggagaggctgagaatctcccaaaagtgggtcagagtggcggtcgtggaatatcatgacggtagtcatgcgtacattggcctgaaggatcgcaagaggccctcagagcttcgaagaattgcctcgcaagtgaaatacgcaggctcacaagtggctagcacttccgaagtccttaagtacactctctttcagattttcagcaagattgacagaccggaggccagccggattactctgcttcttatggcaagccaggagcctcagcggatgtccagaaatttcgtgagatatgtgcagggacttaagaagaaaaaagtcatcgtgatccctgtgggaattggacctcacgcaaatcttaagcaaatacgcctcattgaaaaacaggcccctgagaataaggcattcgtcctgtcatcagtggatgaactcgagcaacaaagggatgagatagtctcctacttgtgtgacctggcacccgaagcgcctccccctacccttcctcctgatatggctcaagtgacggtcggccccggactcctgggcgtttcgaccctgggcccgaagcgcaattcgatggtcctggatgtcgcctttgtgcttgaaggatcggataagatcggtgaggcagactttaacagaagcaaggagtttatggaagaggtcattcagcgcatggacgtcggacaagactcaatacatgtgactgtgctccagtactcttacatggtgactgtggagtacccgttctcggaagcacaatcgaagggagatattctccagcgcgtgcgagaaatccggtaccaaggagggaatcgcaccaacactggtctggctttgcgttacctgtcagatcactcgttcctcgtctcacaaggggatagggaacaggcacccaacctggtgtacatggtgaccggtaaccccgcttcggacgaaatcaagagattgcccggggatattcaagttgtgcccattggggtcggacctaacgctaatgtgcaggaactcgaacgaataggttggcctaacgcacctatcctgatccaagactttgaaaccctcccaagagaagcgcccgacctggtcctgcagcgttgctgtagcggagaggggttgcagattccaactctgtcgccagcaccagactgttcacagcctcttgacgtgattctgcttttggatggctcatcatcctttccagcgtcgtactttgatgaaatgaagtcatttgccaaggccttcatatccaaagcgaacattggtccacgcttgacccaagtcagcgtcctgcagtacggtagcattaccacgattgacgtgccttggaatgtggtgccagagaaggcacatctgctgtcactggtggacgtgatgcagcgggaaggaggtccatcccaaatcggcgacgcactgggatttgccgtgcggtacctgacctccgagatgcacggcgcacggcccggagcatccaaagcagttgtgattcttgtgactgacgtgtcggtggatagcgtcgatgctgcagcggacgcagcacgctcaaatcgggtgactgtctttcctatcggtattggtgatagatacgatgcagcgcaactgaggatacttgcaggaccagcgggagattccaacgttgtgaaactgcagcgcatcgaggatctgcccaccatggtgacccttgggaactcatttctgcataagctctgttcagggtttgtgcgcatttgtatggacgaggacgggaacgaaaaaaggcctggtgacgtgtggactctgcctgaccaatgtcataccgtgacgtgccaacccgatggtcaaactttgctcaaatcccatagagtaaattgcgatcggggacttcgaccatcgtgtccgaactcccaatcccctgtgaaggtcgaagaaacgtgtggctgtagatggacctgtccctgtgtctgtactgggtcatcgacccgacatattgtgacgtttgacggacaaaacttcaagttgaccggatcatgctcgtatgtgctgtttcaaaacaaagaacaggaccttgaggtcattctgcataacggcgcttgtagccctggtgcgcgccagggatgcatgaagtcaattgaagtcaagcactctgccctttccgtcgaactgcatagcgatatggaggtcactgttaacggaaggttggtatctgtgccatacgtgggaggaaacatggaggtgaacgtgtacggagcaatcatgcacgaagtgcgctttaatcatcttggacacattttcacctttacccctcagaacaacgaatttcaactgcaactgtcgcctaagacttttgcgagcaagacctatggactttgcggaatatgtgacgagaatggagcgaacgactttatgcttagagatggcacggtgaccaccgattggaaaacccttgtgcaggaatggaccgtgcaaagaccagggcaaacctgccagcctatccttgaagaacaatgtctggtcccagactcctcccactgccaagtgctccttctgcctcttttcgcagagtgccacaaagtgcttgcacctgccacgttttacgcaatctgtcagcaagattcgtgtcatcaggaacaagtgtgcgaagtgattgcatcctacgcgcacctgtgtcggactaatggtgtctgtgtggattggagaactcctgatttttgtgcgatgtcgtgccctccttctctcgtgtacaatcattgcgagcatggttgcccgcgtcactgcgacggcaacgtgagctcatgtggagatcatccaagcgaggggtgcttctgcccacccgataaggttatgcttgaagggtcctgcgtgcccgaagaggcctgtacccaatgtatcggcgaggacggtgtccagcatcagtttctcgaagcctgggtgccagaccatcaaccatgccagatctgtacctgcctgtcgggtagaaaggtgaattgtaccactcaaccatgcccgactgccaaagcccctacctgtggactgtgcgaagtcgcgcgcttgcgacaaaacgccgatcagtgctgtcccgaatacgaatgtgtctgcgatccagtgagctgtgacctccctcccgtgccacattgcgaacgcggcctccagcctactctgactaaccctggggaatgccgacctaactttacttgtgcctgtagaaaggaagaatgcaagagagtgtcaccacctagctgccctccacaccgcctgcccaccctccgaaagacccaatgctgtgatgagtacgaatgtgcatgtaactgtgtgaacagcactgtcagttgtcctctcggttacttggcaagtacggcaacgaatgactgtggttgtaccaccactacttgccttccagataaggtctgtgtgcaccggtccaccatttaccccgtgggtcaattctgggaagagggatgtgatgtttgtacctgtactgacatggaggacgccgtgatgggacttcgggtggcacagtgctcacaaaagccctgtgaggatagctgtcgttcaggctttacctacgtgcttcatgaaggtgaatgctgcggtcggtgccttccttctgcatgtgaggtggtcacggggagcccccgcggtgattcacagtcgtcctggaaatcggtgggttcacagtgggcatcaccagaaaacccctgtctgattaacgaatgcgttcgtgtgaaggaagaagttttcattcagcagcgcaacgtgtcatgtccccagctggaagttcccgtgtgccctagcggatttcagctgtcatgtaaaacgagcgcatgttgtcctagctgtagatgtgaaaggatggaggcctgtatgctgaatggaacggtgattggccctggaaagactgtgatgattgatgtctgcaccacctgtagatgtatggtccaagtgggtgtgatctcgggatttaagttggaatgtagaaaaactacgtgtaacccatgtccgctcggatacaaggaagagaacaataccggagagtgttgcggtaggtgtttgcctacggcctgtaccattcaactgagaggaggacaaatcatgactctgaagagggatgagactttgcaagatggctgcgacacgcatttctgcaaggtgaatgaaaggggtgagtacttctgggaaaagcgagtgacggggtgtccacctttcgacgagcacaagtgtctggcggagggaggcaagataatgaagataccaggtacttgctgtgatacttgtgaggagccagaatgtaacgatattactgcccgcctgcaatacgtgaaggttgggtcgtgcaaatccgaagttgaagtcgatattcattactgtcaaggcaagtgtgcttcgaaggccatgtactccattgacatcaacgatgtgcaagaccagtgtagctgctgttcgcctactagaaccgagccaatgcaagtggcactgcattgcactaacggttcggtcgtctatcatgaagtgcttaacgcaatggagtgtaaatgtagccccagaaagtgttcgaaa

SEQ ID NO: 21351 - DNA, 8439 bp, synthetic construct
  misc_feature 1..8439: note = source = /note="Description of Artificial Sequence: Synthetic coding sequence"
  source 1..8439: mol_type = other DNA
atgatcccagcccggtttgcaggtgtcctgttggctctggcactgatcctcccaggaacgctgtgcgcagaaggtacaagaggtaggagttctacagcccggtgctccctgtttgggtctgacttcgtgaacaccttcgacggctccatgtactctttcgcaggctactgctcctacctgctggcaggcgggtgccaaaagcgctcatttagtatcataggagatttccaaaacgggaaaagggtgtctctgagcgtctacttaggggaattctttgacattcatttgttcgtcaatggcactgtgacccagggcgatcagagagtctcaatgccctatgccagcaagggtctttacctcgaaacggaggccggctactacaagttgtccggtgaggcctacgggttcgtcgcgcgaattgacggatccggtaattttcaggtactgctgtctgaccgatatttcaataagacatgtgggctgtgtggaaactttaatatttttgcagaggatgattttatgacacaggagggaaccctgacaagcgatccttatgacttcgctaatagctgggcactgagttcaggagaacagtggtgtgagagggcctctcctccatcttcttcctgtaacatctctagtggtgagatgcaaaagggtttgtgggagcagtgtcaactgcttaagtctacatccgtgttcgcacgatgccaccccctggttgatcccgagccatttgttgctttgtgtgagaagactctgtgcgagtgtgcaggtggattagaatgtgcctgtccagccctcttagagtatgctcgtacgtgcgcgcaggaggggatggtcttgtatggctggacggaccactcagcatgctctcccgtctgtccagccgggatggaatatcgtcagtgcgtcagcccctgcgcccgaacatgtcagtccctgcacatcaatgagatgtgtcaagagcgttgcgtagatggatgtagctgtccagaaggacagttactggatgaaggcctgtgcgtcgaatccaccgaatgtccatgtgtgcatagtggaaagaggtatcctccgggaacttccctgtcccgagactgtaatacatgcatatgtaggaattcacagtggatctgcagcaacgaggagtgtcccggtgaatgcctcgtgaccggccagtcccatttcaagtcctttgacaatcgctacttcacgttttccgggatctgccagtacctgctcgcccgcgactgtcaggaccatagttttagcatcgtgatagagaccgtccagtgcgctgacgaccgggacgctgtgtgcacccgatctgtcactgtgaggctgccaggcctgcacaatagcttagtgaagttgaagcatggcgctggcgtggctatggacgggcaggatgtgcagctgccgcttttgaaaggggacctgcgcatccagcacaccgtgacagcctcagtacggctttcgtatggagaagacttacagatggactgggatgggcgagggcgcctacttgtgaagctcagtcccgtgtatgcaggaaaaacatgcgggctgtgtggcaactacaatggaaatcaaggcgacgatttcctaactcccagcgggctggccgaacctagagtggaggatttcggaaacgcgtggaagctgcacggagattgccaagatctgcagaagcagcatagtgacccttgtgccctgaatcctcggatgacacggttttctgaagaggcatgcgccgtactgacctctccaaccttcgaggcatgccatcgagctgtatcacccctgccctacctcaggaactgccggtacgacgtgtgttcttgcagcgacgggcgcgagtgtctctgtggagcgctagccagctatgcagcagcctgtgctggcagaggtgtgcgagtggcgtggcgggaacctggcaggtgtgagctgaattgccctaaagggcaagtataccttcagtgtggtacgccttgcaacctgacttgcaggtccctgagttacccagacgaggagtgcaacgaggcctgcttggagggatgcttctgcccacccggattgtacatggatgagagaggcgattgtgtgcccaaggctcagtgcccatgctattatgatggggagatttttcagccagaggatatattctctgatcatcacaccatgtgctattgtgaagacggattcatgcattgtacaatgagtggggtgccagggtccctactgcccgatgccgtgctgagcagcccactttctcatcggtctaagcggtcactgagctgtcggcctcctatggttaagctggtgtgccccgccgacaatctgagggcagaagggctggaatgtaccaaaacctgccagaactatgacctcgagtgcatgagcatgggctgtgtgtctgggtgtctctgcccaccggggatggtgcgccacgagaatagatgtgtcgccttggagcgctgtccttgcttccatcagggtaaagagtacgccccaggtgagaccgtgaagatcggatgtaatacatgcgtgtgccaggacaggaagtggaactgtaccgaccacgtctgcgacgccacttgctctactataggtatggcccactacctgacgttcgacgggcttaaatacctgttccccggagaatgtcaatacgttctggtgcaagactactgtggatctaatcccgggacgttccggattctggtgggaaataagggttgtagtcaccctagcgtgaagtgcaaaaaacgcgtgaccatacttgtggaggggggcgagatcgaactctttgacggcgaggtgaacgtcaaaaggcctatgaaagatgagactcactttgaggtggttgagagtggccggtacattatcctccttctgggcaaggccttgtccgttgtgtgggatcgacatttgtctatttctgttgtcctgaagcagacctaccaggagaaagtctgcggattgtgcgggaatttcgacgggattcagaataacgacctgacatctagcaatctgcaggtggaggaagacccggtcgacttcggtaattcttggaaagtgagttcccagtgtgctgacaccagaaaagtacccctcgattcatcccctgccacctgccacaacaacatcatgaaacagacgatggtagattcaagctgcaggattctcacgtccgatgttttccaggattgcaacaagctggtggacccagaaccatacctggatgtgtgcatatacgatacttgtagctgcgaatcaattggagattgcgcttgcttctgtgataccatcgccgcgtacgctcatgtgtgtgctcagcacggcaaggtggtcacatggagaacagccacgctttgcccccagtcttgcgaggagaggaacctgcgcgagaatggctacgagtgtgagtggagatataactcgtgtgctccagcttgccaggtgacgtgccagcatccagagccactggcatgtcccgtgcagtgcgtggaaggatgccacgcacattgtcctcccgggaaaattttggatgagctcctgcagacttgcgttgaccccgaagactgcccggtgtgtgaggttgctggccgcagattcgcgagtgggaaaaaggtgactttgaacccctccgacccggagcactgccagatctgtcactgcgacgttgtgaaccttacctgcgaggcgtgccaggaaccaggcgggctggtcgtcccccctaccgatgccccagtgtcacctaccactctctacgtggaagacatctccgagccccctctgcatgacttttactgtagccgactcctcgacctcgtctttctgctcgatggctcctcgcgactgagtgaggccgagtttgaggtgctgaaagctttcgtggtggacatgatggagcgactacgaatctctcagaagtgggttagggtggccgtcgtggagtatcacgatggctcgcacgcgtacataggcctgaaggacagaaaacgaccatctgaactgcgcaggatcgcctctcaggtcaaatatgctgggtcccaggtcgcctctacaagcgaggtccttaaatacacactttttcaaatattttccaagatagatcgtccagaagcctccaggatcaccctgctgctgatggctagtcaagaaccccagcgaatgtcaaggaacttcgtgaggtacgtgcagggattgaagaaaaagaaggtgatcgtgattccggtcgggatcggccctcatgctaatctgaagcagattcgcttgatcgaaaagcaagcgccagagaacaaggcttttgtgctgagtagcgtggacgagctagagcagcagagggatgagattgtgagctatttgtgcgatctggccccagaagcccctccacctactctgccccctgacatggcacaggtcacagtgggaccggggttgctcggagtgagcaccctgggccccaaaaggaacagcatggtgctcgacgtcgcctttgtgctggaagggtccgataagatcggagaagccgattttaacagatccaaggaatttatggaggaggtgatccagcgcatggatgtgggccaggacagcattcatgtgactgtgctgcaatacagctacatggtgacagtggagtatccttttagcgaggctcagtctaagggcgacatcttgcagcgcgtcagggaaatccggtaccaagggggaaaccgcaccaacacagggctggccctgcgctacctgtcggatcactcatttttggtgagccagggtgaccgggagcaagccccgaacctcgtatacatggtcactggcaacccggccagtgacgaaattaaacggcttcctggagatatccaggtggtgccaattggcgtcgggccaaacgcgaatgtgcaggagcttgagcggatcggatggccgaacgcccctattctgattcaggatttcgagacactgccccgtgaagcacctgatttagtgctgcaacggtgttgctctggagaaggtctccagattcctacattgtcacccgctcctgattgctcgcaacccctcgatgttatccttctcctcgatggcagcagttctttccccgccagctattttgacgagatgaagagttttgccaaggctttcatctccaaggcaaacattgggccaagattgactcaggtttccgtattgcaatatggctcgatcacaacgatcgacgtgccctggaacgtggtccctgagaaagcgcatctcctgagcctcgtagatgtcatgcagcgtgaaggagggccatcccaaattggggatgccctgggattcgccgtccgctacttgaccagcgagatgcacggagcccgccctggtgcaagcaaggctgtggtgatcctggtgaccgacgttagtgttgattccgttgatgcagccgccgacgcggcaagaagcaatagggtgaccgtgtttcccattggaattggggacaggtatgacgccgcccagctgcgcattttagccgggcctgcaggagactcaaatgtggtgaaactgcaaaggatcgaagacttgcccacaatggtgaccttgggaaattctttcctccataagctgtgctcgggcttcgtaaggatctgtatggatgaagacgggaacgaaaaacgccctggagatgtctggacccttccagaccagtgccataccgtaacatgtcaacctgacgggcagaccctgctgaaatcacatcgagtaaactgtgacagaggcctgagaccctcgtgccctaacagccagtctcccgttaaagtggaggagacctgtggatgtaggtggacctgtccctgcgtctgtacaggaagcagcaccaggcatatagttacatttgacgggcaaaactttaagttgactggatcgtgttcctacgtcctgttccaaaacaaagaacaggacctcgaagtgatactccacaatggagcttgttctcccggggctagacaaggctgcatgaaatcaatcgaagtaaagcatagcgctctgagcgtggagctgcatagcgatatggaagtcaccgtgaatggccgcttggttagcgttccctacgtaggtgggaacatggaggtgaacgtgtacggggccataatgcacgaagtccgctttaatcatttgggccacatctttactttcactccccaaaacaatgagttccagctccaactgtctcctaagacctttgcatccaagacttatggcctttgcggtatctgtgacgagaatggcgcgaacgatttcatgcttcgcgacgggacagtcaccacagactggaagaccttggttcaagagtggactgtgcagagacccggtcagacatgccagccaatcctagaagaacagtgcctggtgcccgattctagtcattgccaggttctgcttctgcctttgttcgccgaatgtcacaaggtgttagctccggcaactttttacgctatctgtcagcaggattcgtgccaccaagagcaggtgtgcgaggttatcgcctcctacgcccatttatgtcgtaccaacggcgtctgtgtggattggcgcacacccgacttctgcgcaatgagctgccccccaagtctggtgtataaccattgcgaacatgggtgtcccaggcactgtgatgggaacgtgtccagctgtggcgatcacccctccgaggggtgtttctgccctcccgacaaggtcatgctggagggatcttgtgtcccggaggaggcttgcacccaatgcatcggcgaggatggggtacaacaccagttcctcgaagcatgggtgccggaccaccaaccctgtcagatctgtacttgcctatctgggcgaaaggtaaattgtactacccagccctgccctacggcgaaggcgcccacttgtggcctgtgtgaagttgccaggctacgacagaacgctgatcagtgctgccccgagtatgagtgcgtgtgtgaccctgtttcctgcgacctcccccctgtgccccactgtgagaggggcctccagccaacgttgacaaatcctggcgaatgtcgccctaatttcacgtgcgcctgcagaaaggaagagtgcaaacgagtgagccctccctcctgccctcctcaccgattgcctacactaaggaaaactcaatgctgtgatgaatacgagtgcgcctgcaactgcgtgaatagtaccgtgtcctgccccctgggctaccttgcgtctaccgctacaaacgactgcggctgtacgacaactacctgcctgcccgacaaggtgtgtgtgcaccggtctactatctatccagtaggtcagttttgggaagaaggatgtgatgtttgcacctgtactgacatggaggacgccgtgatggggcttagggttgcccagtgctcccaaaaaccttgtgaggattcatgtcgcagcgggttcacctatgtgctgcacgagggggagtgttgcgggcggtgtctcccgtccgcatgtgaagtggtaaccggttcgcccagaggcgactcgcagtcatcatggaagtcagtcgggagccaatgggcaagtcctgagaacccgtgccttatcaacgaatgcgtgagggtgaaagaggaggtatttattcaacagagaaacgtgagctgcccacagcttgaggtgccggtttgcccctccggctttcagctgagctgcaaaaccagcgcctgctgtccttcatgccggtgcgagagaatggaagcctgcatgctcaatggcaccgtgatcggtcctgggaagaccgtgatgatcgacgtttgcacgacttgccgctgcatggtgcaggtcggcgttatttcgggctttaagctggagtgccgtaaaacaacatgcaatccctgcccccttggatataaagaagagaataacactggcgagtgctgcggtcggtgcctgccgacagcctgtactattcagcttagaggcggccaaataatgaccctgaaaagagacgaaacacttcaagatggttgcgacacccacttttgtaaagtgaacgagagaggggaatatttttgggaaaaacgagtgaccggttgtcccccgtttgatgagcacaagtgcctggctgagggcggcaagatcatgaagattccaggaacatgttgcgacacttgtgaggaaccggagtgcaacgacatcaccgcccgtctccagtatgtcaaagtgggctcgtgtaagtcagaggtcgaggtcgacattcactactgccaggggaaatgtgccagtaaagccatgtattctatcgatatcaacgacgtgcaggatcagtgctcatgttgttctcccactaggaccgagcccatgcaggtggctcttcactgcacgaacggtagcgtcgtttatcatgaggtactcaatgcaatggaatgcaagtgtagtccacggaaatgctcgaaa

SEQ ID NO: 21352 - DNA, 8439 bp, synthetic construct
  misc_feature 1..8439: note = source = /note="Description of Artificial Sequence: Synthetic coding sequence"
  source 1..8439: mol_type = other DNA
atgattccagccaggttcgctggcgttctcctggctctcgctctgattcttccaggtactctgtgtgccgagggtaccagaggtaggagcagcacagcacgctgttcactcttcggtagcgacttcgttaacacattcgatggctcaatgtattcctttgctggatactgctcctatctgctggccggtggttgtcagaagagaagcttttccatcatcggcgatttccagaacggcaagagagtgtccttgtctgtctacttgggtgagtttttcgatatccacctgtttgtgaacggtacagtcacccaaggagatcagagagtatccatgccttacgccagcaagggcttgtatttggagactgaagctggatattacaagctgtctggcgaggcctacggttttgtagcacgcatcgatggctcaggtaacttccaagtgctgctgagcgatagatatttcaacaaaacatgcggcctctgcggaaacttcaatattttcgccgaagacgacttcatgactcaggagggcaccctgaccagcgatccctacgacttcgctaacagttgggccctgtccagtggcgagcaatggtgcgagagagctagcccacccagtagttcctgtaatataagcagcggagagatgcagaagggcctctgggaacaatgccagctgttgaagagcacttctgtcttcgccagatgtcatcctctggttgacccagaaccatttgtcgccctctgcgagaaaacactttgcgaatgcgccggcggcctcgagtgcgcttgccctgccctcctcgagtacgcaaggacctgtgcacaagagggtatggtgctgtatggctggaccgatcatagcgcttgttcccccgtgtgccccgcaggtatggagtaccgccaatgcgtcagtccatgcgcaagaacatgtcaatccctgcacattaacgagatgtgccaggaaagatgtgtggacggatgttcatgcccagaaggtcagctcctggacgaaggtctctgtgtcgaatccactgaatgtccttgcgtgcattctggcaaaaggtatccccccggtaccagcctgtctagagactgtaacacttgtatatgtcgtaactcacaatggatttgctccaacgaagagtgccccggcgagtgccttgtaacaggtcagtctcacttcaagtccttcgataacaggtacttcacattttctggcatttgtcaatacctccttgccagggattgccaggatcactctttttcaatcgtgatcgagactgtacagtgtgctgacgacagagacgcagtctgtactaggtcagttactgttcgtctccccggccttcataacagcttggttaagctcaagcatggagcaggtgtggccatggacggtcaagacgttcagcttcccttgctgaagggagacttgagaatccagcataccgttaccgcaagcgtaaggctgtcttacggcgaggaccttcagatggattgggacggaagaggccgtctgctcgtgaagctctctcccgtctatgctggaaagacatgcggactctgcggaaactataacggaaatcaaggcgacgattttctgacaccaagtggattggccgagccccgtgtcgaggactttggcaacgcctggaagctgcacggtgactgccaggatctgcaaaagcaacatagcgacccctgtgctctcaatcccaggatgacccgttttagcgaggaagcctgtgctgtcctcacaagcccaaccttcgaagcctgccaccgcgctgtgtccccccttccctatctcaggaattgtagatacgatgtttgtagttgttccgacggtcgtgagtgcctctgcggcgccctcgcttcttacgccgccgcatgcgccggtaggggcgtgcgcgtggcctggagagagcccggcagatgtgagttgaactgccccaaaggacaggtctaccttcaatgcggcaccccatgcaacttgacatgccgtagtctttcataccctgatgaagaatgtaacgaggcatgtcttgagggatgcttttgccctcccggactgtacatggacgagcgtggcgactgcgttcccaaggcccagtgcccatgctattatgatggagagatcttccaacctgaagacattttcagtgaccaccataccatgtgctactgtgaagacggtttcatgcactgcaccatgagcggtgtgccaggatcccttctccccgacgccgtgcttagcagcccattgtcccacagatctaagagatcactgagttgtaggccaccaatggtgaaactggtttgccccgctgacaacctgcgtgctgaaggcctggagtgcactaaaacttgccagaattacgacctggagtgtatgagtatgggctgtgtatccggatgcctctgtcctccaggcatggttaggcacgagaaccgctgcgtcgccctggaacgttgcccctgtttccatcagggcaaggagtacgcacctggagaaaccgttaagatcggatgcaatacttgcgtatgccaagaccgtaaatggaattgtactgatcacgtatgtgatgcaacatgctccacaatcggaatggcccactaccttaccttcgatggactgaagtacctgtttcccggcgagtgtcaatatgtactggtacaggattactgtggatctaaccctggaacattcagaatcttggtgggtaacaagggctgcagtcaccctagcgtcaagtgtaagaagcgcgtcactatcctggtggagggaggcgagatcgaactgtttgacggtgaggtcaatgtgaaaaggcctatgaaggacgagacccatttcgaggtcgtggagtccggaaggtacatcatcctgttgctcggtaaggctttgtccgtcgtatgggacaggcatttgagtatctcagttgtcctgaaacaaacttatcaggagaaggtctgtggcttgtgcggaaattttgatggcatccaaaacaatgaccttacttcttcaaaccttcaagtggaagaggacccagtggatttcggcaactcctggaaagtgagcagccaatgtgctgatacccgcaaggtcccattggacagctctcccgctacatgccataacaacatcatgaagcagactatggtcgactcatcttgccgcatcctgacatccgacgtgtttcaggattgcaataagctggttgatcctgaaccttacctggatgtatgcatttatgatacatgctcttgcgaatccatcggagattgcgcctgcttctgcgacaccatcgctgcctacgctcacgtgtgtgcacaacacggtaaggtggtgacctggaggacagccacactttgtccacaaagctgtgaagagcgcaaccttcgcgaaaatggctacgaatgcgagtggcgttacaactcctgcgctcccgcttgtcaggtgacttgccagcatccagaacctcttgcctgtcctgtgcagtgtgtcgagggttgccacgcacattgtccaccaggtaagatcctggatgagctgctccagacttgtgtggaccctgaggactgtcctgtgtgtgaggtggcaggtaggagattcgcaagtggcaagaaggtgaccttgaaccccagcgatcccgagcactgtcagatatgtcattgcgatgtggtcaacttgacatgcgaagcctgtcaggaacccggcggccttgtcgttccacccaccgacgctcctgtttcccctacaactttgtatgtggaagatatttcagagccacccttgcacgacttttattgctcacgtctccttgacctcgtgttcctccttgatggctcttccagactgtctgaggctgagttcgaggtgctgaaagccttcgtggtggacatgatggagaggctcaggatttctcagaagtgggtgcgtgtggctgtggtggaataccatgatggctcacacgcctacatcggactgaaagacaggaaacgcccatctgagctgcgcaggatagcttcccaggtgaagtacgctggatcccaggttgcaagcacctctgaggtgttgaagtataccctgtttcagatctttagtaaaatcgatcgtccagaggctagtcgtatcaccctgctcctgatggcatctcaggaacctcaaagaatgagccgcaacttcgttcgctacgtacagggcctgaagaagaagaaggttattgtgatcccagttggcatcggcccacacgccaacttgaaacagatacgtctgatcgagaagcaagctccagagaacaaggcattcgtcctgtctagcgttgatgaactggagcagcagcgtgatgaaattgtatcttacctttgcgacttggccccagaagcacctccccctaccctgcctcctgacatggctcaagtgacagtgggaccaggactgctgggtgtttcaaccttgggtcccaagagaaattctatggtgctcgacgtagccttcgtgctcgagggctcagacaagatcggcgaagctgacttcaatagaagtaaggagttcatggaggaggttatccagcgcatggatgttggccaagatagcatccacgtgaccgtgctgcagtattcctacatggtcacagtggagtacccattctccgaggcccaatccaagggcgacattctgcagcgcgtccgtgagatcagataccagggaggcaatagaacaaacaccggcctcgctctgcgctacctgtctgaccacagcttcctggtgagccagggagacagggaacaggcccctaacctcgtttacatggtaactggcaacccagcctccgatgaaatcaagcgtctccctggtgacatacaagtcgttccaattggagtgggacccaacgctaacgtgcaagagctggagaggatcggttggcccaacgcccctattctgatccaggattttgagacattgcctagagaggccccagatttggtcctccagcgttgctgttctggagaaggtctgcagatacccactttgtcacctgctcctgactgttctcaaccattggatgtgatcttgctgttggacggatccagctccttcccagcatcatactttgacgaaatgaagagtttcgcaaaagccttcatttccaaggccaatatcggcccccgtctcacacaggtctcagtgctgcagtacggcagcattaccacaatcgacgtgccatggaatgttgtgccagaaaaggcccatttgctttccctcgtcgatgtaatgcaaagggagggaggaccctcccagatcggcgatgccctcggcttcgccgtgaggtacctgacttcagaaatgcatggagctagacctggtgcatctaaggctgtcgttatccttgtcaccgacgtttctgttgattcagttgacgctgccgccgacgccgcacgtagcaacagagttactgtgttcccaatcggcattggcgatcgttatgacgccgcacagctgcgcatcctggctggtcctgctggcgattctaacgtcgtgaagttgcaacgtattgaggatctgccaactatggtcacactgggtaacagttttctgcataagctttgtagcggatttgtccgtatatgtatggatgaggatggtaacgaaaagagaccaggagatgtgtggactctgcccgaccagtgtcataccgttacttgtcagcccgatggccagactctgttgaagtcacaccgtgtgaactgcgacagaggtttgagaccatcctgccccaactctcagtctcctgtgaaggttgaggagacatgcggatgcaggtggacctgcccctgcgtctgcacaggttcaagtacacgtcacatcgtgacttttgacggtcagaatttcaaactcaccggcagctgcagttatgtcctctttcagaacaaggaacaagatcttgaagtaatcctgcataacggcgcctgctctcccggtgctcgtcagggttgcatgaagtccattgaggtcaaacatagcgccttgtctgtggagttgcactccgatatggaagtaacagtgaacggccgcctcgtctccgtgccctacgtaggcggtaatatggaggtgaacgtctatggtgctatcatgcatgaggttagatttaaccacctgggccacattttcaccttcacaccccaaaacaacgaatttcaactccagctgtcccccaagactttcgctagcaagacctacggattgtgcggaatatgcgatgagaatggtgctaatgacttcatgttgcgcgacggcactgtcacaactgactggaagacactggtgcaagagtggaccgtgcagcgcccaggtcaaacctgtcagcctattcttgaagagcagtgcctggttcccgattccagtcactgccaggtgttgctgttgcctctcttcgctgaatgccacaaggtgttggccccagccactttctacgccatctgtcaacaggacagctgtcatcaggagcaggtgtgcgaagtaattgcttcatacgctcatctctgcaggacaaacggtgtctgtgtggattggaggactcccgacttctgcgctatgtcctgccctcccagtctggtttataaccattgcgagcacggatgcccccgccactgtgatggtaacgtaagtagttgcggcgaccacccaagtgaaggttgcttctgcccacccgacaaggtgatgcttgaaggatcctgtgtccctgaagaagcctgcacacagtgtattggtgaagatggagtgcagcaccagttccttgaggcttgggtgcctgatcaccagccatgccagatctgtacctgcctctccggccgcaaggttaactgtacaactcaaccttgtcctactgcaaaagctcccacatgcggcctgtgcgaagttgctaggctgaggcagaacgccgaccagtgctgccctgaatacgagtgcgtgtgcgaccctgtctcctgcgatctgccacctgtgccccattgcgagcgcggcttgcagcctacactcaccaatccaggtgagtgcagaccaaacttcacttgcgcctgtcgtaaggaggagtgcaagagagtgtcacctcccagctgcccacctcaccgtttgcctaccttgagaaaaactcagtgttgtgacgagtatgaatgtgcctgcaactgcgtgaacagcaccgtttcctgccctctgggttacctcgcatccaccgctaccaacgattgtggctgtaccaccaccacctgtctccccgataaggtgtgcgttcataggagtactatctaccctgtgggacaattctgggaggagggctgtgatgtgtgcacatgcacagatatggaggatgcagtgatgggactgcgcgtggcacaatgttcccaaaagccttgtgaggactcttgcaggtccggtttcacctacgttctgcacgagggcgagtgttgtggacgctgccttcccagcgcatgcgaggtcgtgaccggcagtcccagaggagactctcagtcatcatggaagtcagtgggcagccagtgggctagtcctgaaaacccttgcttgattaacgagtgcgtgcgcgtcaaggaggaggttttcattcagcaacgtaatgttagttgtcctcaacttgaggtacctgtttgtccaagtggtttccagttgagttgcaagaccagcgcctgctgcccttcttgcagatgcgaaaggatggaggcatgtatgctcaatggaaccgtaatcggaccaggtaagactgtgatgatcgacgtgtgcactacttgtaggtgcatggtacaagtgggagtcatcagcggtttcaagctggaatgcaggaagacaacctgcaatccatgtccattgggttacaaggaggagaacaacaccggtgagtgctgtggaagatgtttgcccaccgcctgcactatacagctgcgtggaggtcaaattatgacactgaagagggatgaaactttgcaagatggctgtgacacacacttctgcaaggtgaacgagcgcggagaatatttctgggaaaaacgtgtgaccggatgccctcctttcgacgagcacaaatgccttgctgagggcggtaagatcatgaagattcctggaacctgttgtgacacctgcgaggaaccagaatgcaatgacattacagcacgcctccagtatgtcaaagtcggcagctgcaagtctgaagtggaagtggatattcactactgccagggcaagtgtgcttctaaggcaatgtactctatcgatatcaatgacgtccaggatcagtgttcatgttgcagccctacaaggacagagccaatgcaggtcgcactgcactgcactaacggcagcgtagtataccatgaagtactcaatgctatggagtgcaaatgttcccctcgtaaatgttccaag

SEQ ID NO: 21353 - DNA, 8439 bp, synthetic construct
  misc_feature 1..8439: note = source = /note="Description of Artificial Sequence: Synthetic coding sequence"
  source 1..8439: mol_type = other DNA
atgatccctgccagatttgccggcgtcttactggccctggctttgattctccctggaactctgtgcgcagagggcacccgggggaggtcttcaacagcaaggtgttctttgtttggctctgacttcgtgaataccttcgacgggtccatgtatagcttcgctggctattgctcctacctcttagccggtggttgccagaagaggagtttcagtattatcggggacttccagaacggcaaacgcgtgtcactaagtgtgtatctaggcgagtttttcgacatccatctgttcgtgaatgggactgttacacagggtgatcagcgtgtctctatgccatacgcatctaaggggctgtacttagagacagaggccggttactataaactgtctggtgaggcatatggcttcgttgcccggatcgatggctcaggtaattttcaagtccttttgagcgatcggtacttcaataagacatgcggactatgcggaaacttcaatatatttgcagaggacgactttatgactcaagagggtactctgacttctgatccctacgacttcgcaaactcatgggccctatcctctggggaacaatggtgcgagcgagccagtccacccagttctagctgtaacatctcaagtggcgagatgcagaaggggctgtgggagcagtgtcaactgctgaagagtacaagtgtctttgcccgctgtcatcccctagtggacccagagccatttgtggccctgtgtgagaaaaccttgtgcgaatgcgctggcggtctggaatgcgcctgtcccgccctgctcgaatatgctaggacctgcgcccaggagggaatggtgctgtacgggtggaccgatcacagtgcctgctctcccgtctgcccagccgggatggaataccgccaatgcgtgtccccctgtgctagaacatgccagtctctgcacatcaatgaaatgtgtcaggagcggtgcgtcgatggctgcagttgtcccgagggacaactcctggacgagggactatgtgtcgagagtaccgaatgcccatgtgtccactctggcaaaaggtacccacctggcactagtctgagccgcgactgtaatacctgcatttgcaggaactcccagtggatatgtagtaacgaggaatgtcctggcgaatgtcttgtgacaggacagagtcacttcaaatcttttgacaataggtacttcaccttttccggtatttgtcaataccttcttgcaagggattgccaggatcactctttttctatagtcatagagactgttcagtgcgcagacgacagagacgccgtctgcacaagatccgtaaccgtgagactacctggtctgcacaacagtctggtgaagctcaaacacggggcaggcgtggctatggacggacaggacgtccagctccctctcctgaagggtgacctgcgaatccagcacaccgtgactgcatcagtcaggctcagctacggtgaggatttgcagatggactgggatgggcggggccgacttctggttaaactttccccagtctatgctgggaagacatgtggactgtgcgggaactacaacggaaatcaaggcgatgacttcctgactccgtcaggccttgccgaacccagggtagaagattttggcaatgcatggaaacttcacggcgattgtcaggacctccagaagcagcacagtgatccctgcgccttaaacccaaggatgactcggttcagcgaagaagcatgcgccgttctgaccagtcccaccttcgaagcctgccatagagctgtttctccactaccctacctccgcaattgccgttatgatgtgtgtagttgtagtgacggccgggagtgcctttgtggcgccttagcctcttacgcagccgcctgtgccggccgaggcgtgagagtggcatggagagagccaggtagatgtgagcttaactgccccaaaggccaggtttacctgcagtgtgggactccatgtaatctaacctgtcggagcctgtcttatccagacgaagagtgtaatgaggcctgccttgaagggtgcttctgtcccccaggcctgtatatggatgaaagaggcgactgcgtcccaaaggcccaatgcccgtgttattatgatggggaaatcttccagccagaagacatatttagtgatcaccataccatgtgctattgcgaggacggcttcatgcactgcaccatgtcaggcgtccccggtagtctgctgccagatgccgtgctgagttccccactatctcaccgaagcaagcggtccctgtcttgtcggcctcccatggtgaagctggtatgtcccgctgataacctgcgagctgagggcctggagtgcaccaaaacatgtcagaattatgatctggagtgcatgtccatgggctgcgtgagtggctgtctgtgtccacccggcatggttcgacatgagaatcgctgcgtagctctggagcggtgcccgtgcttccaccaaggcaaggaatacgctccaggcgaaaccgtgaagattggatgcaacacatgcgtgtgtcaggatagaaaatggaattgtaccgatcacgtatgcgacgctacatgttctaccattgggatggcacattacctgacttttgatgggttgaaatacctgtttcccggggagtgccagtacgtcctcgtccaagactactgtggctctaatccaggtacctttcggatcctcgtggggaataaaggttgcagtcacccaagcgtcaagtgcaagaaacgcgtcacaattctggtagaaggcggagagatcgaactgttcgacggtgaggttaatgtgaaaaggccaatgaaagatgagacccacttcgaggttgtcgagagcggccgctacattatcctgctgctgggcaaggcactgagtgtggtctgggatcgacacctgagtatttccgttgtgctgaagcaaacatatcaagagaaagtgtgtgggctgtgtggtaattttgatgggatacagaataatgatttaacctccagtaatctacaggttgaagaagatccagtggacttcggcaatagttggaaagttagcagccaatgcgcagacaccaggaaagtcccactcgactcaagtcctgctacttgtcataataacatcatgaagcagacaatggttgattcttcttgccggatcctgacctctgacgttttccaggattgtaataaactcgtggacccagaaccctatctagatgtgtgcatttacgacacctgttcttgtgagtctattggcgattgcgcttgtttttgcgatactatagccgcttacgcccacgtgtgcgcacagcacggaaaggtggtgacttggcggactgctacactgtgtcctcagtcatgtgaggagcggaatttaagggaaaacggttatgaatgtgagtggcggtacaacagctgcgccccagcctgtcaagttacttgccagcacccagaacctctggcctgtccagttcaatgtgtggagggttgtcatgcacactgccctcccggcaagatcttggatgagctgctgcagacatgtgtcgaccctgaagattgtcccgtgtgcgaggtcgccggaaggcgttttgccagcggcaaaaaggtgaccttaaatccatccgacccagagcattgtcagatttgccactgtgatgttgttaacctgacttgtgaggcatgccaggagcccggcggcctggtcgtgccacctaccgacgctcctgttagtccaactacactgtacgtggaagacattagcgaaccacccctgcacgacttctactgcagccgtctgctggatctggttttcctgctggatggctccagcagactcagcgaggccgaatttgaggtcttgaaggcttttgtagttgatatgatggagaggctgcgtatttcacaaaagtgggtgcgcgtggcagtcgtcgagtaccacgatggcagccacgcatacatcggcctgaaggatagaaaacggccttctgagctgcgccggattgctagtcaagtgaagtacgctggctctcaggtggcttcaacctccgaggtgctgaagtacactctgtttcagatcttttccaagatcgatagaccagaggctagtagaataacactgttactaatggcctctcaggagccccaacgaatgagtcggaactttgtgcgatacgtccagggcctgaagaagaagaaagttattgtgatacccgttggaatcggcccacacgctaacctaaagcaaataagactgattgaaaagcaggctccagagaataaagcctttgttctctcaagtgtggacgagctggaacaacagcgcgacgagatagtgtcttacctgtgcgacctggccccagaagctccccccccaaccctccctcctgatatggctcaggttacagtggggcctggcctgctaggcgtcagcacactaggtcctaagcggaattcaatggttctggacgttgcctttgtcctggagggctccgacaaaattggagaagcagattttaacaggtctaaggagtttatggaggaggttatccagagaatggacgtggggcaggactctattcatgttaccgttctacaatattcttatatggttactgtggagtatccatttagcgaggctcagtccaagggggatatactgcagcgggtcagagagattaggtaccaggggggtaacagaactaacaccggcctggcactccgatacctgagtgaccactccttcttggtgagtcaaggtgaccgcgagcaggccccgaatctagtgtacatggtgacaggaaatccagctagcgacgaaattaaacggctacccggcgatatccaggtcgttccaatcggggtgggtcccaacgctaacgtccaggagttagaacggattgggtggcctaacgctcccattctaatccaggacttcgagactctgcctcgggaggccccggatctagtgttacagcgctgctgctctggagagggcctgcagatccccacactgtcaccagccccagactgctctcagcccctggatgtgatcctgctgctggatggcagttcctcctttccagccagctattttgacgagatgaaatccttcgctaaagcttttattagcaaggctaacatcggaccccgtctaacccaagtgtctgtcctgcaatacggaagcataaccactatagacgtgccttggaacgtcgttccagagaaggcccatctgctgagcctagtcgatgttatgcagcgcgagggaggcccaagccagataggagacgccttgggtttcgccgtcagatacctgaccagcgaaatgcacggggcccgtcccggagcctccaaagctgttgtgatccttgtaacagatgtctctgttgactcagtggacgccgccgccgacgccgctaggagcaatcgcgtcaccgtgtttccaatcggcataggcgatcgctacgatgccgcccagctgcgcattctggccgggcctgccggcgattccaacgtggttaagctgcaacggattgaggacctgcccaccatggtgaccctggggaattcattcctgcacaagctgtgcagtggttttgttaggatttgcatggacgaggacggcaacgagaaacggcccggggacgtctggaccctgcctgaccagtgccataccgttacctgccagcctgatggacagaccctgttgaagagtcatcgcgttaattgcgatagaggactgcgacctagctgccctaattcacagagccctgttaaggtggaagagacttgcgggtgcaggtggacttgcccctgtgtttgcacaggctccagcacacgccacattgtaactttcgatggtcagaattttaaactaaccggaagctgtagctacgtactgtttcagaataaggagcaggatctggaggtgatactgcataacggggcttgctcccctggagcacgccaaggatgtatgaaaagcattgaggtgaaacatagcgctctgagcgtggagttacattctgacatggaggtgaccgtcaacggaaggttggttagcgtgccctatgtgggcggcaatatggaagttaatgtttacggcgccattatgcacgaggtcagattcaatcacctggggcacatatttactttcactcctcagaacaacgaattccagctccagctatcccctaagaccttcgcctccaagacctacggcctgtgtgggatatgcgatgagaatggagccaatgacttcatgctgcgggatgggacagtgactaccgactggaaaacactcgtccaagagtggaccgtgcagcgacctggacagacctgccagcctatactagaggaacagtgcctagtccccgattcatctcactgtcaggtcctactcctccctctgttcgccgaatgccataaagttctcgcacccgcaacattttatgccatttgtcagcaagacagctgtcaccaggagcaggtctgcgaagtcatcgcctcttatgctcacctgtgtagaactaatggtgtttgtgtcgactggaggacacccgatttttgtgccatgagttgccccccaagcctggtttacaaccactgcgagcacggttgtccccgtcactgtgacggcaatgtatcttcctgcggcgaccatccatctgaaggatgcttttgccccccagacaaagtcatgctagaaggtagttgcgtacctgaggaggcttgcactcagtgtataggcgaggacggcgtccagcaccagttcctggaggcatgggtgcccgaccaccagccatgtcagatctgtacctgcctctccggaaggaaggtgaactgcactacccagccatgtccaactgcaaaagcccccacttgtgggctttgcgaggtcgctcgactgaggcaaaacgccgaccaatgctgccccgagtatgagtgtgtgtgcgacccagtctcctgtgatcttcctcccgtaccacactgcgagcgaggtctacaaccaacactcaccaatcctggggagtgccgccccaacttcacctgtgcttgcagaaaggaggaatgtaagagggtgagtccaccttcctgtccaccacacaggctgccaaccctgcggaagacacagtgttgcgacgagtacgagtgcgcctgcaactgtgttaattctaccgttagctgtccactagggtacctcgcttccaccgccactaacgattgcggctgcactactaccacatgcctccccgataaagtgtgcgtgcacaggagcactatctacccagtcggccaattctgggaggagggctgtgacgtgtgcacatgtaccgacatggaggatgccgtgatgggtctccgtgtcgcacaatgttcccagaagccttgtgaagactcttgccgcagcggcttcacctatgtgctacacgagggcgagtgttgtggccgttgtttgcccagcgcctgcgaggttgtgaccggcagtccacggggggattcacagagcagctggaaatcagttggctctcagtgggctagtcccgaaaacccctgtctgatcaacgagtgtgttcgggtgaaagaggaagtgtttattcagcagcggaacgtgtcctgcccacagctggaagttccagtgtgcccctcagggtttcaactgtcctgtaaaacctccgcatgctgtccatcctgccgctgcgagcgtatggaggcttgcatgctgaacggtactgtcattggccccgggaaaacagtgatgatcgacgtgtgcaccacctgcaggtgtatggttcaggtgggagtcatatccggattcaagctagagtgccggaaaactacctgtaacccttgtcctctcggttataaggaggagaacaatactggcgaatgttgtggccgttgtctccctacagcctgcacaatacagttaaggggcggccagataatgacactcaagcgcgacgaaacactgcaagatggctgcgatacccacttctgcaaagtgaatgagagaggggagtatttttgggaaaaaagagttactgggtgcccacctttcgacgaacataagtgcttagctgagggcggcaagatcatgaaaatccccggcacctgctgtgatacatgcgaggagcctgagtgcaatgatatcacagcacgactgcaatacgtgaaggtggggagttgtaagagcgaggtggaagtggacattcattattgccaggggaagtgcgctagtaaggccatgtactccatcgatatcaacgatgtgcaggaccagtgcagctgctgttcccctacacgtaccgaacctatgcaggtcgctctgcactgcaccaacggctcagtcgtttaccatgaagtcctgaacgccatggaatgcaagtgctctccccgaaagtgcagtaag

SEQ ID NO: 21354 - DNA, 8439 bp, synthetic construct
  misc_feature 1..8439: note = source = /note="Description of Artificial Sequence: Synthetic coding sequence"
  source 1..8439: mol_type = other DNA
atgataccagccaggtttgctggcgttttattggcactggccctgatactccctggaaccctctgtgcagaaggaacgcgcgggaggagctcgaccgcgaggtgttccctattcggatccgatttcgtcaatacctttgacggcagtatgtactccttcgccgggtactgctcttacctcctcgctgggggttgtcagaaaagaagtttcagcatcattggcgactttcaaaatggcaaacgagtcagtctcagcgtctatctgggagagttcttcgacatacacctctttgtcaatggtacagttacacagggtgaccaacgagtgagcatgccatatgctagtaaaggtctatacctggaaaccgaggccggttactacaaactgagcggcgaagcttacgggttcgtggcccgtattgatgggagtggaaattttcaggtactgctgagtgaccgctatttcaataaaacttgtgggctctgtggcaactttaatatttttgccgaagacgacttcatgactcaggaaggcactctgacctcagacccatatgactttgccaattcttgggcccttagttctggcgaacagtggtgcgaacgggcaagccccccgagcagcagttgtaacatatcttcaggagagatgcagaaaggtctctgggagcagtgtcaattgttaaagtccacaagcgtgtttgccaggtgccatccactggtagatccagagcctttcgttgccctttgcgagaaaacgctgtgtgagtgcgccgggggcttggagtgtgcttgcccggcccttctcgaatacgctcgaacctgtgcacaggagggcatggtgctctacggctggaccgaccatagtgcctgtagccctgtgtgtcctgccggcatggagtacaggcagtgtgtgagtccatgcgcaaggacttgtcaatccctgcacataaatgagatgtgtcaggagaggtgcgtggacgggtgctcatgcccggaaggccagttactcgatgagggactgtgtgtggagtccactgaatgcccttgtgtgcattcaggcaagcgctatcctccaggcacatcgctttcgcgggattgtaatacttgcatctgtcgaaactctcagtggatttgctctaacgaggaatgtcctggggaatgccttgtgacaggccagagccattttaaaagttttgacaacaggtacttcaccttctctggcatttgccagtacctgctggctagggattgccaagaccattccttctcaatcgtgatcgagactgttcagtgcgcagatgatcgggatgctgtgtgcacgcgatctgtcacagtcagactacccgggctccataatagtctggtgaaactgaagcatggtgccggcgtcgccatggatggtcaagatgttcagttgccactccttaagggggaccttcgtatacagcacacagtgactgcctcagttcggttaagttatggcgaagacctgcagatggattgggatgggaggggtcggcttcttgttaagttgtctcccgtgtatgcaggcaaaacctgtggcctatgtggcaattataacggaaaccagggcgatgatttcctcactccctccggtctcgcagagccccgcgtcgaggactttggaaacgcttggaagctccatggcgattgccaggaccttcagaaacaacactctgatccctgtgctctgaaccccaggatgacacggttttccgaagaggcatgtgccgtcttgacatctcccacattcgaggcttgccacagggcggtatcacccctgccctacttgcggaactgccgatatgacgtttgttcttgctctgacggaagagaatgtctgtgcggcgctctggcaagttatgccgccgcttgtgcgggtaggggcgtgcgcgtagcttggagggagccaggtaggtgtgagctgaattgtccaaaaggtcaagtctatctccaatgcggcacgccctgcaatctgacgtgtaggtcactgtcgtatcccgacgaagaatgcaatgaggcttgtcttgaaggttgtttttgcccaccgggactgtacatggacgagcggggagattgcgtgcccaaagcccagtgcccatgctattatgacggggagatctttcagccagaggacatattctccgaccatcacaccatgtgttattgtgaagatggatttatgcactgtaccatgtccggagtgcccggatcattgctgcctgacgcagtgttatctagccctctcagtcaccgatccaagcgctcactttcatgtcggcccccaatggtgaaattggtttgcccggctgataacttgcgcgccgagggtctggaatgcactaaaacttgtcagaactacgaccttgaatgcatgagcatgggatgcgtgtcagggtgtctatgccccccgggcatggtcaggcacgaaaaccgttgtgtcgccctggaaaggtgcccttgcttccaccagggaaaggagtacgcaccaggggaaacagttaaaatcggctgcaatacatgcgtgtgccaggacagaaagtggaattgtacagatcacgtgtgcgatgcgacctgctccactatcggaatggctcattatctgactttcgatgggctcaagtatctgttccccggagaatgtcagtatgtgttggtacaggattactgcgggtctaatcctggtacatttcgcatactcgtgggcaacaagggatgctcgcacccttctgtcaagtgcaagaagcgcgtgacaattcttgtggagggcggagaaattgaactcttcgacggcgaagtcaatgtcaaacgcccaatgaaggatgagactcattttgaggtggtggaatcaggaagatatatcattctgctgctaggtaaggcgctgagcgtggtgtgggataggcacctcagcatcagcgtggtactcaaacagacatatcaggagaaggtctgcgggctctgtggaaattttgatgggattcagaataatgacttgacgagtagtaatctacaggtcgaagaagatcccgtcgatttcggcaattcctggaaggtctcgagccagtgcgccgacacccgcaaagtacccctggattcatctccagctacctgtcacaacaatattatgaagcagacaatggttgactcttcttgtaggattctgacatccgatgtcttccaggattgcaataagctggtggatcccgagccttacctcgacgtgtgcatttacgacacatgttcatgtgagtctataggggactgcgcttgtttctgtgataccattgcagcatacgcccacgtatgcgctcagcatggcaaagttgtaacatggaggactgcaaccctgtgtccccagtcatgtgaggagcgaaatctcagagagaatggctatgagtgtgagtggagatacaacagttgtgctccagcctgccaggtcacctgtcagcatccagaacccctggcttgccctgtacaatgcgttgaggggtgccatgcccactgtccgccaggtaaaatcctcgacgagctattacagacatgcgtagaccccgaggattgtcccgtttgcgaggtcgccggaaggaggttcgcctcagggaaaaaagtcaccttgaacccctccgatcccgaacactgtcaaatctgccactgtgatgtggtcaacctgacatgcgaagcttgtcaggagcctgggggactggtggtgccccctacagatgccccagtctctccaacaacactttacgtggaagacatatccgaaccccccctgcatgacttttactgttctcggctcctggacttggtgttcctcctggatggctcatccaggttgtccgaagctgaattcgaagtcctgaaggcatttgtggtggatatgatggagcggctgcgaatttcgcagaagtgggtcagggtggcggtggtggaatatcacgacggcagtcacgcgtatataggcctcaaagaccgcaagcgacctagcgaattgagacgaatagcctcgcaagtgaaatatgccgggtctcaagtggctagcactagcgaggttctgaaatataccttgttccaaatcttcagtaagattgatcgacctgaggctagccgtattacgctgctgctgatggcctctcaggaacctcagcggatgtctaggaatttcgtcaggtatgtgcagggcctaaagaaaaagaaagtgatcgttatccctgtaggtattgggccacacgccaacctgaagcagattcggttgatagaaaagcaggcgccagaaaacaaggccttcgtgctgtcctccgtcgacgagttggagcaacagcgagacgagatcgtctcctatctatgcgacttggcacccgaagctccacctcccactctgccgccagatatggcccaggttaccgtcggacctgggctcctaggggtgtctacactggggcccaagcgaaacagtatggtgctagatgtggcattcgtgctggaaggctctgataagatcggagaagctgatttcaataggtctaaagagttcatggaggaggtgatccaaagaatggatgtgggacaggactccatccacgttactgtgcttcagtactcatacatggtcactgtggagtacccatttagtgaggcgcagtcaaagggtgatatactgcagcgggtgcgagaaatcagataccagggaggaaaccgcaccaacactgggctggccctgagatacttgtccgaccactcatttctcgtgagtcagggggaccgcgaacaagcaccaaacctggtttatatggtgaccgggaatcctgcttccgacgaaataaagagattgcctggagatatccaagtggtcccgattggcgtaggccccaatgccaacgtgcaggaattggagcgtattggctggccaaatgcccccattctaattcaggactttgagacactgccccgtgaagcccccgatctggtactgcagaggtgttgctccggtgagggtctgcagatacccacacttagcccagcaccggactgctctcaacctctcgacgtgatacttctgctagacggatcctcctcatttcccgcctcctatttcgatgagatgaaaagttttgctaaggcattcatttctaaggccaacatcggtcccagactaacccaggtgtccgttctgcaatacgggtccattacaacaatcgatgtaccgtggaatgtagtgcccgaaaaagcccaccttctctcgctggtcgatgtcatgcagagggagggagggcctagtcagatcggcgacgctctcggatttgcagtccggtatttgacttcagagatgcatggagctaggcccggcgcttcaaaggccgttgtgatactggtgacagacgtgtcagtggattccgtggacgctgcagctgatgctgccagaagtaatcgagtaacagtgtttcctatagggatcggagatcgatatgatgccgcccagctgcgcatcctggcaggtccagccggggactcaaatgtcgtcaagcttcaacggattgaagacctacccacgatggtaaccttggggaattcatttctccacaaactctgcagtggtttcgtgcgcatctgtatggacgaagatggcaacgaaaagagacccggcgatgtgtggacgttgcctgatcagtgccatactgtaacatgtcagcctgacggccagacactcctaaaaagtcaccgtgtaaattgtgaccggggccttcggccttcctgtcctaacagccaatctcccgtgaaggtggaggagacttgtgggtgcaggtggacttgtccctgcgtgtgcactggatctagcaccagacacatcgtgaccttcgatgggcaaaatttcaagcttaccggcagctgtagctacgtcctgtttcagaataaggagcaggatctggaggtgatactccataacggcgcctgcagcccaggtgcaaggcagggttgcatgaagtcgatcgaggtgaagcacagcgcacttagcgtcgaattacacagcgatatggaagtgaccgttaacgggaggctggtgagcgtgccctatgtcggagggaatatggaggtgaatgtgtatggcgcaattatgcatgaggtacgttttaaccacctgggccacattttcaccttcactccgcagaacaatgaattccagttgcaactttcccctaaaacttttgcctctaagacttatggactgtgtgggatttgtgacgagaacggggcgaatgatttcatgttgcgcgacggcacagtgaccactgactggaagacactcgtgcaggagtggacagtccaacggccgggtcagacttgtcagcctatcctcgaggaacaatgtttggtccccgattcgtcccactgccaagtgctgctactgcccttgttcgctgagtgtcataaagtcctggctccagctaccttctatgccatctgtcagcaggacagttgccaccaagaacaggtgtgcgaggtcatcgcctcctacgcccatctctgccgtaccaatggggtatgtgtggattggcgaactccagacttctgcgctatgagttgcccgccaagtcttgtctataatcactgcgagcatggttgcccacggcactgtgatgggaacgtttcctcatgcggcgatcacccaagtgagggttgtttctgtccccctgataaggtaatgctggagggctcttgcgttccggaggaggcctgcacacagtgcatcggggaagacggagtgcagcaccagttcttggaggcctgggtgccagatcaccagccatgtcaaatctgcacttgtctgtccggtaggaaggtgaactgcacgacgcagccttgtcccactgccaaggctcctacttgcggcttgtgtgaggtggcacggctacgtcagaacgccgatcagtgttgccccgagtatgagtgtgtgtgtgatcctgtgtcatgcgatcttcctcctgttcctcactgcgagcgcggtctgcagcctactctcacgaaccccggcgaatgccgtccaaattttacctgcgcgtgtcggaaggaggaatgcaagcgagtctccccaccaagctgtccgcctcatagattgcccactctgaggaagacccaatgctgtgatgagtacgagtgcgcttgtaactgcgttaacagtaccgtgtcctgtcccctggggtatttggcctcaaccgctacaaacgactgtggctgcaccaccacaacctgcctacctgacaaggtgtgcgtgcatcggtctacaatctaccctgtcggtcagttctgggaagagggatgcgatgtttgcacttgcacagacatggaagatgcagtgatgggcctcagagtggcccagtgctcacagaaaccatgtgaagacagctgccgcagcggcttcacgtacgtgctgcacgagggagaatgttgcggacgttgcctgccatccgcctgtgaagtggtgaccgggtctcctcgcggtgactcacagagttcatggaagagtgtcgggtctcaatgggcctctcccgagaatccttgtctgattaatgagtgtgtcagagtaaaagaggaggtgtttatacaacagaggaacgtgagctgcccgcagctggaggtgccagtctgtccctctggatttcagctgtcatgtaaaacgtccgcctgttgcccatcttgccggtgtgagcgcatggaagcttgtatgcttaatggaacagtcatcggcccggggaaaactgtgatgatcgatgtctgtacgacctgcaggtgtatggtccaagtgggagtcatttccggattcaagctcgaatgccggaaaaccacctgcaatccatgtccactgggctacaaggaagaaaataacaccggtgagtgctgcggacgttgcctgcctacggcatgtacgatccaactgaggggaggtcagatcatgacgttgaagagggatgagaccctgcaggacggttgcgatacgcatttctgcaaggtgaacgagaggggggaatatttctgggagaagcgggttaccggctgcccccccttcgatgagcacaagtgcctggcagagggaggcaagatcatgaaaatccctggcacatgttgtgatacctgtgaagagccagagtgtaacgatatcacagctaggctgcagtacgttaaggtgggctcctgtaagtcggaggtggaagtagatattcattattgtcagggaaagtgcgcaagtaaagctatgtacagcatcgatatcaatgatgtgcaagaccaatgttcatgttgtagtccaaccagaactgaacccatgcaggttgccctgcattgcaccaacggcagtgttgtttaccatgaagtgctcaatgctatggaatgcaaatgttctcccagaaaatgctcaaag

SEQ ID NO: 21355 - DNA, 8439 bp, synthetic construct
  misc_feature 1..8439: note = source = /note="Description of Artificial Sequence: Synthetic coding sequence"
  source 1..8439: mol_type = other DNA
atgatcccggcgcggtttgctggcgtgctgctggcgcttgctctcatcctgccgggtactctctgcgctgaggggactcggggacgctcgagtaccgcccgctgttccctgttcggatcggacttcgtgaacaccttcgacggatcgatgtactcgttcgccggctactgctcatacctgctcgcaggaggatgccaaaagaggtccttttcgattatcggagacttccaaaacggaaagcgggtgagcctgtcagtctacctcggagaattcttcgacatccacctgttcgtgaatggaactgtcacccaaggcgaccagagagtgtccatgccatatgcctccaaaggactgtatctggaaaccgaagcgggctactacaaattgtccggggaagcgtacgggtttgtcgcccggatcgacggatcagggaatttccaagtgctcctgtcggacagatacttcaacaagacctgcggactgtgcggcaatttcaacatcttcgctgaagatgatttcatgacccaggaaggtacgctgacctcagatccgtacgacttcgctaattcttgggctctctcctcgggggagcagtggtgtgagcgagcgtcgccacctagctccagctgcaacatttcctccggcgagatgcagaagggcctctgggagcagtgtcaattgctgaagagcacgtccgtctttgcccggtgtcacccactggtcgacccagaaccattcgtggctctgtgcgagaaaacgctgtgcgaatgcgcaggcggtctggagtgtgcgtgcccggcgctgctggaatacgcgcgcacctgcgcacaggaaggaatggtgctgtacggctggaccgaccattcggcctgctcgccagtttgtccagccggcatggaatacaggcagtgcgtgtccccttgcgcacggacctgtcaatcgctccacatcaacgaaatgtgccaggaaagatgcgtcgacggctgttcctgcccggaaggacagctgctcgacgaagggctctgcgtcgaatccaccgagtgtccgtgcgtgcactccggtaaacgttaccctccgggcacctcactgtcacgcgactgcaacacttgcatctgcagaaattcccagtggatctgctccaacgaggaatgcccaggagagtgtctggtcactggccagtcacacttcaagtcatttgataatcggtatttcacgttcagcggcatctgtcaataccttctcgcaagggactgccaggaccactccttctcgatcgtgatagagacggtgcagtgcgcggatgatagagatgccgtctgtactcgctcagtgaccgtcaggctgccgggactccacaactcactggtcaagctcaaacatggggcaggcgtggcgatggacggtcaggatgtgcaactgccactgttgaaaggcgatttgcgcatccaacacactgtcactgcatcggtgagattgtcctacggagaggatctgcagatggactgggacgggagaggtagactgctggtgaagctgtcgccggtgtacgcgggcaaaacttgcggcctgtgtggcaactacaacggaaatcagggcgatgatttcctcaccccttcaggactggcggagcctagggtggaggattttgggaatgcctggaagctccatggagattgccaggatttgcagaagcaacattcggacccttgtgccctgaatccacgcatgactcggtttagcgaggaagcctgcgctgtgctcacctcgcctaccttcgaagcctgtcatcgagccgtgtcgcccctgccttacctccgcaattgcaggtacgatgtgtgcagctgtagcgacggacgcgagtgcttgtgcggcgccctggcatcgtacgcggccgcttgcgccggacgaggtgtcagagtcgcctggcgcgaaccagggcgctgcgagctcaactgcccgaaaggccaagtctaccttcaatgtggaaccccctgcaatctgacctgcagatccctgtcctacccggacgaagaatgcaatgaggcctgcctggagggatgcttttgtcctcccggactgtacatggacgaaagaggagactgcgtgccgaaggcccaatgcccctgctactacgatggagaaatcttccagccagaggatatcttttccgaccaccacaccatgtgctattgcgaggatggcttcatgcattgcactatgtccggagtgcctgggtcgttgctgccggatgctgtgctgagctctccactctcccaccgctcgaagagatccctgtcatgccgcccaccgatggtaaagctggtatgcccggcggacaacctgagagcagaaggactggagtgcactaagacgtgtcagaattacgatctggaatgcatgtctatgggttgcgtgtcgggatgcctctgcccgcctggaatggtgaggcatgaaaatagatgcgtcgcattggagcggtgcccgtgcttccatcaaggtaaagagtacgctccaggtgagacggtgaagatcggatgtaacacttgcgtgtgccaggataggaagtggaactgcaccgaccatgtgtgtgacgccacctgctcgactatcggaatggcacactacctgacctttgacggcctgaagtacctcttcccgggtgagtgccaatacgtgcttgtccaagattactgcggttccaatccaggaactttcagaatcctggtggggaataagggatgctcccatccttcggttaaatgtaagaagcgggtcaccatcctggtcgaaggcggagaaatcgaactgtttgacggtgaggtcaatgtgaaaagacctatgaaggacgaaacccactttgaagtggtggagtcgggacggtacatcatcctgctcctgggcaaggcgctcagcgtcgtgtgggaccgacacctgagcatctccgtcgtcctgaagcagacctatcaagaaaaggtgtgcggactgtgtggtaactttgatgggatccaaaacaacgatctgaccagctccaacttgcaggtggaggaggacccggtcgacttcggaaatagctggaaggtgtcctctcaatgcgctgatacccggaaagtcccgcttgactcgtcaccggccacctgccacaacaatatcatgaagcagaccatggtcgactcctcatgccggatcctgacttcggatgtctttcaggactgtaataagttggtggacccggaaccatacctggacgtgtgcatctacgacacttgctcgtgtgaatccatcggagactgcgcctgcttctgtgataccatcgcagcatacgctcatgtgtgtgcccaacatggaaaggtcgtgacctggaggactgccactctgtgccctcagtcctgcgaggagcggaacctccgggagaacggatacgagtgcgagtggcggtacaattcgtgtgcaccggcctgccaggtcacctgtcaacatccggagcctctggcctgccctgtgcagtgcgtggagggttgccatgcccattgcccaccaggaaaaatcctcgacgaactgctgcagacttgtgtggacccggaggattgtccggtctgtgaagtggccggacgccggttcgcgagcggaaaaaaggtcactctgaatccgtccgacccggaacattgccagatctgccactgcgatgtcgtcaatcttacttgcgaagcctgccaagagcccgggggactggtggtgccgccgaccgatgcgccggtgtcgccaacgaccctctacgtggaggacatatcagaaccgccattgcacgatttctattgcagcagactcctcgaccttgtgttcctgctcgacggaagctcgcggctctcagaagcggaattcgaagtgctgaaagccttcgtcgtggacatgatggaacgactgagaattagccaaaagtgggtccgggtggcagtggtggagtaccatgatggctcgcacgcgtacattggactcaaagaccgaaaacggccgtccgaactccggcgcattgcttcacaagtgaagtacgcgggttcacaggtcgctagcaccagcgaggtgctgaaatacactctgttccaaatcttctccaaaatcgatcgccctgaggccagccggatcaccttgcttctcatggcctcgcaggagccccagcggatgtccaggaacttcgtgagatacgtccagggcttgaaaaagaagaaggtgatcgtcatcccagtgggaatcggcccgcacgccaacctcaagcaaatccgccttatagaaaagcaagcaccggaaaacaaggcctttgtgctgtcaagcgtggacgaactggagcagcagcgggatgaaatcgtaagctacctgtgcgacctcgcacctgaagcccctccgccaactcttccgccggacatggcccaagtcaccgtgggaccgggcctcctgggagtgtccaccctgggaccaaagcgcaactccatggtcctggatgtggcgttcgtgcttgaaggatctgacaagatcggcgaggcagactttaacagatccaaggaattcatggaggaggtgatccagcgcatggacgtgggccaggattcaattcacgtcacggtccttcaatattcttacatggtgactgtcgaatatccgttttcggaggcgcaaagcaagggagacatccttcaacgtgtgcgcgagatcagataccaaggtggcaatcggactaacaccgggctggcgttgaggtacctgtcagaccactcgtttctggtgtcgcagggggacagagaacaagctcctaacctggtgtacatggtcactggaaacccagcatccgacgagatcaagcgactgccaggagacatccaggttgtgccaatcggggtcggtccaaacgctaacgtgcaggaactcgaaagaatcgggtggccgaacgcgcccatcctcatccaggactttgagacgctccccagagaagcaccggacctggtgctgcaacgctgctgcagcggggaaggacttcagatccctaccctctcaccggctcctgattgctcacagccactggatgtcatcctgctcttggacggatcgtcatcctttcccgcttcgtattttgatgagatgaagtcattcgccaaagcgttcatctctaaggccaacattgggcccagactcacccaagtctccgtgcttcagtacggatcgatcacgaccatcgatgttccttggaatgtggtgcctgaaaaggctcacctgcttagccttgtggatgttatgcaacgggaaggtggccctagccagatcggagacgctctgggatttgcggtgcggtacctgacctccgagatgcacggagcccggccaggagcttcaaaggctgttgttatcctcgtcactgacgtgagcgtggactccgtggatgccgcggctgacgctgcacgctcaaaccgggtgacggtattcccaatcggcatcggggaccgctacgatgccgcccaactgagaatcttggccggacccgccggcgactccaacgtggtgaagctccagaggattgaggacctgccgaccatggtgaccctcggcaactcgttcctccataagctgtgctccggattcgtgagaatctgcatggacgaggatgggaacgagaaaagacccggcgacgtttggactctcccggaccagtgccataccgtgacctgtcagcctgatgggcagaccctgctgaagtcgcatagagtgaattgcgataggggcctccgaccgtcatgtccaaactcccagtccccggtgaaggtcgaggaaacttgcggatgccgctggacctgcccatgcgtgtgtaccggctcatccacccgccacatcgtcactttcgacggccagaacttcaaattgactggaagctgctcatacgtcttgttccagaacaaggaacaggacctggaggttatcctccataacggggcctgttccccaggagcgcggcagggatgtatgaagtcgatcgaagtcaaacatagcgcactgtccgtggaacttcacagcgacatggaagtgactgtgaatggtcgcctggtgagcgtgccgtacgtcggaggaaatatggaggtgaatgtgtacggagcaattatgcacgaagtccgctttaaccatctcgggcatatcttcaccttcactccgcagaacaatgagttccaactgcagctgtcgccaaagactttcgcgtcgaaaacctatgggttgtgcggaatttgcgacgagaatggggctaacgacttcatgctccgcgatggcactgtgaccactgattggaaaacgctcgtgcaagaatggaccgtgcagaggccgggccagacgtgccagccgatcctcgaagaacaatgccttgtgccggattcgtctcactgccaggtcctgctgcttccactgttcgccgaatgccacaaggtgctcgccccggccactttctatgccatctgtcagcaggactcctgtcatcaggaacaagtatgtgaggtgattgcctcgtacgcccacctctgcagaactaacggagtgtgtgtggactggagaactccggatttttgcgcgatgtcatgtccgccctcactggtgtacaatcattgcgagcacggatgcccgcgccactgcgacggaaatgtgtctagctgcggagatcacccatccgaaggttgcttctgcccgcccgacaaggtgatgctggagggaagctgtgttccggaggaggcttgcacccaatgtattggtgaggacggtgttcagcatcagttcctggaggcatgggttccggaccatcagccatgccagatttgtacctgcctctcaggacgcaaggtcaattgcactactcagccatgcccgaccgcgaaggcgcccacttgtggactctgcgaggtcgctcgcctccgccagaacgcagatcaatgttgcccagaatacgaatgcgtgtgcgacccagtctcgtgcgatctgccgccggtgccacattgcgaacggggacttcagccgaccctcaccaatccaggagagtgcaggccaaatttcacctgcgcttgccggaaggaagagtgtaagagagtgtcacccccgtcctgtccgcctcatcggctgccgacccttcggaaaacccaatgttgcgacgaatacgagtgcgcgtgcaattgcgttaactcgactgtgagctgtcccctggggtacctcgctagcacggccaccaatgactgcgggtgtaccaccaccacttgcctgccagacaaagtgtgcgtgcacaggagcaccatctacccagtcggacaattctgggaagaggggtgtgacgtatgcacctgcactgacatggaggacgccgtcatgggactgcgcgtggctcagtgttcccagaagccgtgcgaagattcctgccggtcggggttcacttatgtcctgcacgagggagagtgttgcggccgctgtctgccttcggcgtgtgaggtggtcactggctcgcctcggggcgattctcagtcatcatggaaatccgtgggatctcaatgggcctcaccagagaacccctgcctgattaacgagtgcgtccgtgtgaaggaagaagtattcatccagcaacgcaatgtttcctgcccacagttggaggttccggtgtgcccatccgggttccaattgagctgcaagacctcagcctgctgccctagctgcagatgcgagcggatggaagcgtgcatgctcaatggcactgtcattggcccaggcaaaaccgtgatgatcgacgtgtgtaccacttgccggtgtatggtgcaggtgggagtgatctcgggcttcaagctcgagtgcaggaaaaccacttgcaacccttgtcccctgggctataaagaggagaacaacaccggagaatgttgcggccggtgcctgcccaccgcttgcactatccaacttcggggaggacagatcatgactctgaaacgcgacgagactctccaggatggctgcgatactcacttctgcaaggtgaacgagcggggtgagtatttctgggaaaaaagagtgactggatgtcccccatttgacgagcataagtgcctggcagagggcggaaagatcatgaaaatcccaggcacctgctgcgatacctgcgaggaaccggaatgcaacgacatcaccgcgcggctgcagtacgttaaggtgggttcgtgcaaatcagaggtggaggtggatatccattactgtcaggggaaatgtgcgtccaaggccatgtactcgattgacattaacgacgtgcaggaccagtgcagctgttgctcacccaccagaactgagcctatgcaggtggccctgcattgcacgaacgggagcgttgtctatcatgaggtgcttaacgcgatggagtgtaaatgctcgccacgaaaatgctctaag

SEQ ID NO: 21356 - DNA, 8439 bp, synthetic construct
  misc_feature 1..8439: note = source = /note="Description of Artificial Sequence: Synthetic coding sequence"
  source 1..8439: mol_type = other DNA
atgattccagcccggtttgcaggggtcctccttgcgttggccctgatcctgccagggaccttatgtgccgaggggacgcggggccgctcctcaacagcgcggtgcagtctctttgggtctgattttgtcaacacatttgacggctccatgtattcctttgctggatattgtagctatcttctcgcaggaggttgccagaagcgctcattcagcattattggggatttccagaacggtaagcgggtcagtctgtctgtctatttgggagagttcttcgacatacacctgttcgtgaacggaacagtgacccaaggggaccaacgagtgtctatgccttacgcctccaaaggtctttatttggaaaccgaggctggatactataagctgtccggcgaggcgtacgggttcgtggcccgtattgacggctctggcaacttccaggttctgctgtctgataggtacttcaacaagacgtgtggtttgtgcggcaattttaatatttttgccgaagacgatttcatgacacaggagggaaccttgacttccgatccttacgatttcgccaattcctgggcgctgagctctggggagcagtggtgtgagcgtgcttccccaccttcgagctcatgtaacattagctcaggcgaaatgcagaagggtctttgggaacagtgccaacttcttaaatccacaagcgtttttgcgcgttgccaccctctcgttgaccccgagcctttcgtggcgctatgcgaaaaaacactttgcgaatgtgccggggggctggagtgtgcctgccccgccctcttggagtatgcccgcacttgtgcccaagagggcatggtactgtacggatggacagatcacagcgcttgttcaccggtctgccctgcaggcatggaatatcgccaatgcgtgtccccctgcgctcgcacatgtcaaagtttacacatcaatgaaatgtgccaggagcgctgtgtggacggttgttcatgtcctgaggggcagctcttggatgaggggctgtgtgtggagtccacagaatgcccttgtgtgcatagtgggaagaggtatcctcctgggacgtctctgtccagagattgtaacacgtgtatttgcaggaactctcagtggatctgctctaacgaggagtgtcctggcgaatgcttggtgacagggcagtcccactttaaatccttcgacaaccgttacttcaccttctccggtatttgccagtacctgttggcccgcgattgtcaggatcattcttttagtatcgtgatcgagacggtgcagtgcgccgacgatcgcgatgcggtttgtacaaggtcagttacagttcgcctgcctgggctacacaacagtcttgtaaagctcaaacatggcgccggggttgctatggatggacaagacgttcagttgcccttacttaaaggagacctgaggatccaacatacagtcacagcaagtgtgcggctcagctatggtgaggatttgcagatggactgggacgggcgtgggaggctcctggttaagttgtcgcctgtgtatgctggtaagacctgtggtctttgcggcaactacaacggtaaccagggtgatgactttctgacaccaagtggcttggccgagcctcgggtcgaggatttcggaaatgcttggaaactccacggggactgccaggacctgcaaaaacagcattcagatccgtgtgcactcaatcctaggatgacaaggtttagtgaggaggcttgcgccgtgctgacttctcctacatttgaggcatgtcaccgagccgtcagtcccctgccgtatctccgaaattgcagatacgatgtatgctcctgcagcgacggacgcgaatgcctgtgtggagctcttgcatcctacgccgcggcctgtgccggacgaggagtgcgggtagcatggagagagccagggcggtgcgagctgaactgccctaaaggccaggtctacctccagtgtgggaccccatgtaacctcacctgtaggtccttgagctatcccgacgaggaatgtaacgaggcgtgtctcgaggggtgcttctgccctcccggcctatacatggacgaacggggcgattgcgtgcctaaggcgcagtgcccttgctattacgacggtgagatattccagcccgaggacatattcagcgatcaccataccatgtgctattgtgaagacggattcatgcattgcactatgtcgggggtcccgggcagcctcctgccggacgccgtcctaagctctcccctgtcccaccgctctaagcggtccctgtcatgtagacctcctatggtgaagctggtgtgccccgccgataacctcagagccgaagggttagaatgcactaagacatgtcagaactacgatctagaatgtatgagcatgggatgcgtttctggatgtctgtgtccccccggcatggtgcgtcacgaaaaccgatgcgtagctctggagaggtgtccctgcttccatcagggtaaagagtacgccccaggcgagactgtgaagataggttgtaatacctgcgtctgccaagacagaaaatggaactgcactgaccatgtctgtgacgcgacctgctctactatcggaatggctcactacctgacctttgacggccttaaatatctattcccaggagagtgccagtatgtgcttgtacaggattactgtggatctaatcctggcaccttcaggattctcgtgggcaacaaaggttgttcccacccctcagtgaagtgtaaaaagcgcgtgacaattttagtagaaggcggcgagattgaactgtttgacggcgaagtgaacgtgaagcgcccaatgaaggatgagacccacttcgaggtcgttgaatcaggtcggtatattatacttctactgggaaaagccctttcagttgtctgggatcggcacctgagtatcagtgttgtactgaaacagacttatcaagagaaggtgtgcggactgtgcggcaatttcgatggaattcaaaataacgatttgacctcttccaaccttcaggttgaagaggatcctgtggactttgggaattcatggaaggtgtcgtcgcagtgcgctgatactcgcaaggtacctttggactcgtcccctgcgacatgccataacaacattatgaaacagacaatggttgactcatcatgtcgcattcttacgagtgatgttttccaggattgcaataaacttgtggaccccgaaccctacctggatgtatgcatctacgacacctgttcctgcgagtcgattggcgattgcgcctgcttctgcgacaccattgctgcatacgcccacgtgtgcgctcagcatgggaaggtggtgacttggaggacagcaactctgtgcccccaatcttgcgaggaacgcaatctgcgcgagaatgggtacgagtgcgagtggaggtacaacagctgcgcacccgcctgtcaggtcacatgtcagcaccccgagcctctggcgtgccctgtgcagtgtgtggaaggttgtcacgcacactgtcctcccgggaagattctcgacgaactgttacaaacttgcgtggaccccgaagattgtccggtttgtgaagtggccggacgccggttcgcatccggtaaaaaagtgactctcaacccctccgaccctgagcactgccagatatgtcactgcgacgtcgtcaatctcacatgtgaggcctgccaggagcctggaggtctggtggttccaccaacagatgcaccagtgtctccaacaaccttgtacgtagaggacatctcagaaccaccactgcacgacttttattgctcccgactgctagacctggtgttccttcttgatgggtcgtcccgcctaagtgaggccgagtttgaggtgctaaaggcttttgtcgtcgatatgatggagcggctacgcattagtcagaagtgggtgagggtggccgtggtagagtaccacgacggatcccacgcgtatatcggactcaaagaccgcaagagacccagtgaactaagacggatcgcttcacaagttaagtatgccggaagtcaggtggcctctaccagcgaggtcctcaagtataccctgttccagatcttctctaaaatcgatcgcccggaagctagtcgcataaccctgttgctcatggcctcccaggagccacagcggatgtcgcgcaattttgtgaggtacgtgcagggcttgaaaaagaagaaggtaatagtcataccggtgggcatcggcccacatgcaaatctcaaacaaatcaggctcattgagaagcaggctcccgaaaacaaggctttcgttctcagtagtgtggacgagttggaacagcagcgggacgagattgtgtcttacctctgcgatttagcccccgaagcaccgccccctacactgcccccagacatggctcaggtgacggtaggtccaggacttctcggagtgagcaccctcgggccaaagcgcaatagtatggttcttgacgtggcgtttgttcttgaagggagcgacaagatcggagaggctgacttcaatcggagcaaggaattcatggaggaggtgatccagcgcatggacgtggggcaagattctatccacgtgactgtcctccaatactcttacatggtgacggtggagtatcctttctctgaagcacaatctaagggggacattctgcagagggtgagggagattcggtaccagggtgggaaccgcactaatactgggcttgccctcaggtacctgagcgatcactcttttttggtttctcaaggggacagggaacaggcgccgaacctggtctatatggtgacagggaacccagccagcgatgagatcaagcggttacccggcgatatacaggtcgtgcctatcggcgtgggaccgaatgccaacgtccaagagctggaacgtataggttggccaaacgctccgattctgattcaggacttcgagacgctgcctcgagaagcgccggatctggtactgcagcgctgttgctctggcgagggtttgcaaattcctactttaagtccagcgccagactgctctcagcctctggacgtgattcttttactggatggcagctcctcttttcccgcttcttacttcgatgaaatgaagagcttcgccaaggcttttatttcgaaagcaaacatcggcccacggctgacccaggttagtgtgctacagtacggttctatcaccacaatagacgtgccatggaatgtcgtgcccgaaaaagcgcacctgctgagcctcgtcgacgtgatgcaacgcgaaggaggaccaagccagatcggtgacgcactaggcttcgctgtacggtatctcacatcagaaatgcacggcgcaagacctggcgctagtaaggctgtggtcatcctcgtgaccgacgtctcagtggacagcgtggacgcagccgccgacgctgcgcgctctaaccgggtgacagtgttccctatcggaatcggcgacaggtatgacgccgcccaactgcgcattctggcgggacctgcaggcgattccaacgtcgttaaactgcaaaggatcgaagatctgcctaccatggtcactctgggcaattccttcttacacaagctgtgctccggcttcgtgagaatctgtatggacgaggacggaaacgaaaagcgcccaggtgatgtgtggacactccctgaccaatgccacacggtaacatgccagcccgacggacaaaccttgttaaagtcgcacagggtgaactgcgaccggggactgagacctagctgccctaacagccaatcacccgtaaaggtagaagagacctgcggctgccggtggacatgcccctgtgtgtgtactggctcctccacaagacatattgtgacttttgacggtcagaatttcaagcttaccggaagctgcagttatgtgcttttccagaataaggagcaggacctggaagtcatactgcacaacggggcttgtagtcctggagccagacaaggttgtatgaaatctatagaagttaaacactccgccctatccgtggagctgcacagcgacatggaagtgactgtcaacggtagactagtgtcagtgccctatgtgggtggcaatatggaggtgaacgtgtacggggccattatgcatgaagtgcggttcaatcaccttggacacatctttacatttacccctcagaacaacgaatttcagctgcaactctcacctaaaacatttgcaagtaagacttatggcctctgcggcatctgcgatgaaaatggagccaacgattttatgcttagggacgggaccgtgacaaccgactggaagaccctagtgcaagaatggacagtccaacggcctggacagacatgtcagcctattttggaggagcaatgcttggtccccgattcttcacattgtcaggtgctgctccttcctctctttgctgaatgccataaggtcctcgcacccgcaaccttctacgccatttgccagcaggactcctgtcaccaggaacaggtttgcgaggtcattgcttcctacgcacatttgtgtcgcactaacggtgtgtgcgtcgattggagaacgcccgacttctgtgctatgtcttgtcccccatctctggtgtataaccactgcgagcatggctgtcctagacactgtgatggcaatgtgtctagctgcggagaccatccgtccgagggctgtttctgtccacccgataaggttatgctagaaggctcttgcgtgccagaggaggcgtgcacacagtgcatcggggaagacggcgtgcagcaccaatttctcgaggcctgggtgccagaccatcagccatgccagatatgcacttgtttatctggcaggaaagtaaattgcactactcagccatgcccaacggcaaaggctcctacatgcggcctctgtgaagttgcccgactgagacagaatgcggaccaatgctgcccagaatatgaatgcgtctgtgaccctgtgagctgcgatttaccccctgtgcctcattgcgaacggggcctgcagcccacactaaccaacccaggggagtgtcgacccaattttacctgcgcctgcagaaaggaagagtgtaagagggtcagccccccctcatgtccaccccatagactgccaacattgaggaaaacccagtgctgtgatgagtatgaatgtgcctgtaactgcgtgaattcaacggtgtcttgccccctgggatatctggcaagtaccgcgacaaacgactgcggctgtacaaccactacttgtttgcccgataaggtatgtgttcacaggtcaactatatatccggtgggccagttttgggaagaaggatgcgatgtatgtacctgtaccgacatggaggatgcagttatgggacttcgggtcgcccagtgttcgcagaaaccttgcgaagatagctgccggagcggtttcacatatgtcctccatgagggcgagtgctgtggcaggtgcctgccatccgcctgtgaggtcgtcacggggagtccacgaggagatagccagtcctcttggaaaagcgtgggatcgcagtgggcgagccccgaaaacccctgtctgattaacgaatgcgtgcgtgtgaaagaggaggtgtttattcagcaacggaacgtgagttgtccccagttggaggttccagtgtgtcctagtggattccagttaagctgtaagacaagcgcttgttgccctagttgtcgttgtgagcgcatggaggcatgtatgctcaacggcacagtcattgggcccggcaagactgtgatgatcgacgtctgtacaacctgccgttgcatggtgcaggtcggcgtgattagtggcttcaagctggagtgtagaaaaaccacctgtaacccttgccccttaggctacaaggaggagaacaacacgggcgaatgttgcggccgctgtctccctaccgcatgcaccatccaactcagaggaggccagataatgacactgaagagagacgaaacactccaggatggctgtgacacgcacttctgcaaggtgaatgagcgtggggaatacttttgggagaagagggtgaccggctgtccaccctttgacgaacacaagtgtctcgcagagggtggtaaaatcatgaagattcccgggacgtgctgcgacacatgtgaagagcctgagtgtaatgacataaccgctcgcctgcagtatgtgaaagtggggtcctgcaagagtgaggtggaggttgatatacattattgtcaaggcaaatgtgcctcaaaagccatgtacagcattgacatcaatgacgtgcaagaccaatgcagctgttgcagtcctacaagaactgaacccatgcaggtggcccttcactgtacaaatggctctgttgtgtatcacgaagtgctcaatgcgatggaatgtaaatgctctccgcggaagtgtagcaag

SEQ ID NO: 21357 - DNA, 8439 bp, synthetic construct
  misc_feature 1..8439: note = source = /note="Description of Artificial Sequence: Synthetic coding sequence"
  source 1..8439: mol_type = other DNA
atgattccagcgcgctttgcaggggttcttcttgccctggcactgatcttgccgggaactctgtgtgctgaagggaccagaggacgctcctcaactgcccggtgttccctcttcggatcggactttgtcaatacgttcgatgggtcgatgtactcctttgccggatactgtagctaccttcttgcgggaggttgtcagaaaaggtccttttcgatcattggagactttcaaaatggtaagcgggtgtcactttccgtgtatctgggcgagttttttgatatacatctgttcgtgaacggcaccgtgacgcaaggggatcaaagagtgtcgatgccctacgcatccaaaggactttacctcgaaaccgaagcgggatattacaagctgagcggggaagcatacggctttgtcgcacggatcgacggttcggggaattttcaagtgcttctgtcagaccggtactttaacaagacctgtggactgtgtggcaactttaacatatttgcagaggatgactttatgactcaagaaggcaccctcacttcggatccatacgattttgcaaattcgtgggcactctcgagcggtgagcagtggtgcgagcgggcaagcccaccttcgtcgagctgcaacatttcgagcggagaaatgcagaagggtctttgggagcagtgtcagctgctgaaatcgacctcggtgtttgcaagatgtcatccacttgtggacccagaaccattcgtggcactctgtgaaaagaccctgtgtgagtgtgcgggtggtctggaatgcgcatgtccagcactcctggagtacgcacggacttgtgctcaggaaggtatggtcctgtacggctggactgatcactccgcctgttcgccagtgtgtcctgcgggaatggagtatagacagtgtgtgtcaccatgtgcaaggacgtgtcaaagcctgcacatcaacgaaatgtgtcaagaacgttgcgttgacgggtgtagctgtccagagggccaacttcttgatgaaggactgtgtgtggaatctacggaatgcccatgtgtgcacagcggaaagcgatacccgcctggcacgtccctctcgagagattgcaacacttgcatctgtcgtaactcgcaatggatctgttcgaacgaggaatgtccaggggagtgccttgtgactggacaatctcatttcaaatcattcgacaaccgttactttaccttctccggtatctgtcagtacctcttggcaagggattgtcaggatcacagctttagcatcgtgattgaaaccgttcaatgcgcagacgatcgggatgcagtatgtaccaggtccgttaccgtcagactccctggactgcacaattcgcttgttaagttgaaacatggcgccggcgtcgcaatggatgggcaagatgtgcaactccctctgctgaagggggatctgagaatacaacatactgtcaccgcgtcggtgaggctgtcatacggtgaggatttgcaaatggattgggatggaagaggtaggttgctcgtgaagctgagcccggtctacgcaggaaaaacctgtggcctgtgcggaaactacaatgggaaccagggagatgattttcttaccccttccggactcgccgaaccgcgggtggaagattttgggaacgcttggaaacttcacggagattgccaagaccttcagaagcaacattcagatccatgtgcacttaatccaagaatgacccggttctccgaagaggcgtgtgctgtcctgacctcacctacttttgaagcatgccaccgagcagtcagccctctgccatatttgcggaactgccgatacgacgtgtgttcatgctccgatggtcgggagtgtttgtgcggtgccctcgcctcatacgctgcagcatgtgcaggacggggagtgagagtggcctggcgggaaccaggccggtgtgagctcaattgtccaaagggtcaggtctaccttcagtgcggaaccccatgtaatctcacttgcagaagtctttcctacccagacgaagagtgcaatgaagcatgccttgaaggttgtttctgtcccccaggcctttacatggacgagagaggtgattgcgtcccaaaggcccaatgtccgtgctactacgatggagagatattccaaccagaggatatcttctctgatcaccatacgatgtgctactgtgaggacgggtttatgcattgtaccatgtcaggcgttcctggatcactcctccctgatgcagtgctttcatcgccactttcacacagatccaaacgctcgcttagctgcaggcctcctatggtgaagttggtgtgtcctgccgataacctcagggcagagggtctggaatgtactaagacctgtcagaactacgacctggaatgcatgtcgatgggttgtgtgtcaggttgtttgtgtccgcctggaatggtgagacacgaaaatagatgcgtggccctggaaagatgcccttgcttccatcagggaaaagaatacgcacctggcgaaaccgtcaaaattggatgcaatacctgcgtctgtcaggatagaaagtggaattgtaccgatcatgtgtgtgatgcgacttgtagcactattggaatggcccattatcttacctttgacggacttaagtaccttttcccaggagagtgtcaatacgtgctcgtgcaggattactgcggtagcaatccggggacttttaggatacttgtgggaaataaggggtgttcccacccatctgtcaaatgtaagaaaagagttaccattctcgtcgagggtggcgaaatcgaactcttcgatggagaggtcaacgttaagcgaccaatgaaggatgaaacccatttcgaggtggtcgagagtggacggtacattatcttgttgctcggaaaggccctctccgtggtgtgggatcgccacctgtcgataagcgtggtgctgaagcagacgtaccaagaaaaagtgtgcggactctgtggaaactttgatggaattcagaataatgatctgacctcgtccaaccttcaggttgaggaggatccagtggattttggcaattcctggaaggtgtcctcgcagtgcgcagatactcgcaaggtaccacttgactcgagcccagccacttgccataacaacattatgaagcaaaccatggtggacagttcctgtagaattctgacctccgacgtctttcaagattgcaacaagctggtggaccccgaaccctacttggacgtctgcatctacgacacttgttcatgcgagtccattggcgactgtgcctgtttctgcgatacgattgcagcgtacgcacatgtctgtgcacaacacgggaaggtcgtgacttggcggactgctaccctgtgcccccaatcatgtgaggaacgaaacctgagagaaaatggttacgaatgcgaatggcggtacaattcttgtgccccggcctgtcaagtgacttgccaacatccagaacctctggcgtgtccggtgcagtgtgtggaaggttgtcatgcccattgtcctccgggaaagattttggacgaactccttcaaacttgtgtggaccccgaggattgccctgtgtgcgaggtggcaggacgccgttttgcgagcggtaaaaaggtgactctgaatccgtcggatccagagcattgtcagatctgtcactgtgatgtcgtgaacttgacctgtgaggcctgccaagaacccggcggactcgtggtgccgcctaccgacgcaccagtgtcgcctactaccctctatgtggaagatatttcagaaccaccactgcatgacttctattgctcccgcttgcttgaccttgtttttctgctggacggcagctcccggctgtcagaagccgagtttgaagtgttgaaggcatttgtggtggatatgatggagagactgagaatttcacaaaagtgggtgagagtcgcagtcgtggaataccatgacggatcgcatgcctacatcggccttaaggatagaaaacgaccctcggagcttcgtagaatcgcttcgcaagtgaagtacgcgggaagccaggtcgcctcgacttcggaagtgctcaaatacaccctctttcaaatcttttccaaaatcgaccggccagaagcatcgagaattacgctgcttttgatggccagccaagagccccagcggatgagcagaaatttcgtgagatacgtccaaggcctgaagaaaaagaaggtgattgttatcccagtggggatcggccctcatgctaacctcaagcaaattaggctgattgaaaagcaggcgcccgagaataaagcgtttgtgctttcctccgtggatgaactcgagcagcaaagagatgagatagtctcatacctttgcgatcttgccccagaagcaccaccgccaaccctgcccccagatatggcacaggtgaccgtgggccccggactcctgggtgtatcgactctggggccaaagagaaattcgatggtcctggatgttgcatttgtgcttgaaggtagcgacaagattggtgaagctgatttcaaccgtagcaaggagttcatggaggaagtgattcaacgcatggacgtcgggcaggattcgatacatgtgacggtcctgcaatactcctacatggttaccgtggagtaccctttctcagaagcgcaatcgaagggcgatatcctgcaacgtgtgcgggaaattcgctaccaggggggtaatcggactaacactggcctggcccttagatacctttccgatcattcattccttgtgtcgcagggcgaccgtgagcaggccccaaacctcgtctacatggtcactggtaaccccgctagcgacgagattaagagacttccaggtgatattcaggtcgttcctattggtgtggggcctaacgcaaatgttcaagagcttgagagaattgggtggcctaacgcaccaattctcatccaggattttgaaaccctcccacgagaggcccctgatctcgtgttgcagcgttgctgctcgggagaaggactccaaattccaaccctgtcccctgccccagattgttcccagcctttggatgtgatcttgctcctggacggttcctcatcattcccagcatcctactttgatgaaatgaagtcatttgctaaagccttcatctcaaaagcaaacataggacctcgactgacccaggtgagcgtgcttcaatatggctccattaccactatagacgtcccatggaacgtcgttcctgaaaaagcacatcttctgagcctggtggacgtgatgcaacgggaaggaggaccttcgcagatcggagatgcactgggctttgccgttcgctatctcacttccgagatgcacggggcccggccgggggcttcaaaggcagtggtgatccttgtcactgatgtcagcgtggattcagtcgacgccgcagcagatgcagcaaggtccaaccgcgtgaccgtgtttcctattggtattggagatcgctacgatgcagcacagctgcgcattctcgccggcccagcaggagactctaatgttgtgaagctccagaggattgaagatcttcctactatggtgactctcggtaattcgtttcttcataagctctgctcgggctttgtgcgcatctgcatggatgaagatggcaatgagaagcgccccggagatgtctggactctgcccgatcagtgccataccgtcacttgtcagcctgatggtcaaacccttctgaagagccacagagtcaactgtgatagagggcttaggccgtcctgcccgaactcgcaatcccctgtgaaggttgaggaaacctgtggctgtaggtggacttgcccgtgtgtctgcactgggagctcgaccaggcatatcgtcacttttgacggacagaactttaaactgactgggagctgttcctacgtactctttcagaacaaggaacaggatcttgaagtgatcctccataatggtgcctgttctcctggagcgcgccagggatgtatgaaaagtatcgaggtcaagcattctgccctttcagtggaactccactccgatatggaggtgactgtgaatggtaggcttgtctccgtgccttacgtgggagggaacatggaagtgaacgtgtatggggcgatcatgcatgaagtccgatttaaccatttgggtcacatattcactttcacccctcaaaacaatgaatttcaactccaactgtcccctaagacttttgcgtcaaaaacttacggtctgtgtggaatatgtgacgagaacggcgcaaatgactttatgttgcgtgacgggaccgtcactaccgattggaaaaccctggtgcaagaatggaccgtgcaacgtccgggccaaacttgccagcctatcctggaagagcagtgcctggtgccagatagcagccactgccaggtgttgcttctgcctctttttgcagagtgtcacaaggttcttgcaccggcgaccttctacgctatctgtcagcaggatagctgccatcaagagcaagtgtgtgaagtcattgcatcgtacgcccatttgtgtcggactaatggcgtctgtgtggactggcgaacccccgatttctgtgcaatgagctgccctccatccctggtctacaatcattgcgagcacggatgtcctagacactgcgatggaaacgtctcatcatgcggagatcatccttccgaaggttgtttttgtccccccgataaggtgatgctggaaggctcatgtgtgcccgaagaagcatgtacgcaatgtatcggagaagatggggtgcaacaccaattcttggaggcatgggtcccagatcatcagccttgtcagatatgtacgtgtctgtccggtcgtaaagtgaactgtaccacccagccctgccctactgccaaggctcctacttgcggactctgcgaagtggcaagacttcgacaaaacgcagatcaatgttgccccgaatacgaatgcgtgtgtgatcccgtgagctgcgatttgccacctgtgccacactgcgagcgaggtctgcaacctaccctgactaacccgggggagtgcagacctaactttacctgtgcatgtagaaaggaagaatgtaagagggtgtcccctccttcgtgtccccctcatcgtctgccaactctcagaaagacgcagtgttgcgatgagtacgaatgtgcatgcaactgcgtgaactccaccgtctcatgccctcttggatacctggcatcgactgcaaccaacgactgtgggtgtaccactacgacctgtctgcctgataaagtgtgtgtgcatagatccacgatttaccctgtgggacaattttgggaagagggttgcgacgtctgtacttgtactgacatggaggatgcagtgatggggctccgggtggctcaatgtagccaaaaaccatgtgaggattcgtgcaggtccggtttcacttacgtgctgcacgaaggagaatgttgcggtcggtgtctgccttcggcgtgtgaagtggtgactggttccccaagaggcgactcccagtcgtcgtggaagtcggtgggatcgcagtgggcgtcgcctgagaacccatgcctgattaacgaatgcgttcgggtgaaagaagaggtattcatccagcaacgtaacgtgtcgtgtccacagctcgaagtgccagtctgtccttcggggttccagctgtcctgcaagacgtccgcatgctgcccatcgtgcagatgcgaaaggatggaagcatgtatgcttaacgggactgtgataggacccggcaagactgtgatgattgacgtatgtactacgtgtcgctgtatggtgcaggtgggagtcattagcggatttaagctcgaatgtcggaaaaccacgtgtaacccatgtccccttgggtacaaagaagagaataacactggcgagtgttgtggccgctgcttgccgaccgcatgtacgatccagctgcgtgggggacagatcatgaccctgaagagagatgaaactctgcaagatggttgtgatacccatttttgtaaggtcaatgaaaggggagagtacttttgggaaaaaagggtgaccggctgtcctcctttcgatgaacataagtgcctggccgaggggggaaagataatgaagattcccggaacttgttgcgacacctgcgaagagcccgaatgcaacgacattaccgcccgtctgcaatacgtgaaagtaggtagctgtaagtccgaagtggaagtcgacattcactactgtcaaggaaaatgcgcatcgaaggcaatgtactcgatagatatcaacgacgtccaggaccaatgctcatgttgtagccctactagaactgaacctatgcaagtggcgctgcactgtaccaatggctcagtggtgtaccatgaggtgcttaacgccatggaatgtaaatgttcaccccggaaatgttcgaag

SEQ ID NO: 21358 - DNA, 8439 bp, synthetic construct
  misc_feature 1..8439: note = source = /note="Description of Artificial Sequence: Synthetic coding sequence"
  source 1..8439: mol_type = other DNA
atgatcccggcccggtttgcgggcgtgctgctggctctggcgctcatcctcccggggactctgtgcgcagaaggaactagaggacgctcgtccaccgcccggtgtagcctgttcggatcagattttgtgaacactttcgatgggtcaatgtactccttcgccggatactgctcgtacctgctcgctggcggatgccaaaagaggtccttttcaatcatcggcgatttccaaaatggcaagagagtgagcctgtcggtgtacctgggcgagttcttcgacatccacctcttcgtgaacggtaccgtcactcagggggatcagcgcgtgtcgatgccctacgcttcaaaaggactctacctcgagacggaggcaggttattacaagctgtcaggagaggcctacgggtttgtggccagaattgacggctccggaaacttccaggtgctcctctctgaccgctacttcaataagacctgcggcctgtgcggaaacttcaacatctttgcagaggacgatttcatgactcaggaaggaacgctgacctcggacccgtacgacttcgcgaactcgtgggcgctgagcagcggtgagcagtggtgcgagcgggccagccctccgtcctcaagctgcaacatttcaagcggagaaatgcaaaaaggcctctgggaacaatgccagctgctgaagagcacctcagtgttcgcacggtgccatccgctcgtggatccggaaccgttcgtggccttgtgcgagaaaaccctctgcgagtgcgccggagggctggaatgcgcatgtcctgcgctgctggaatatgctcgcacctgcgcccaggagggcatggtcctgtacggctggactgaccactcagcatgttcccctgtgtgtcctgcaggtatggaatataggcagtgtgtgtcaccgtgtgctagaacctgccagtcgcttcatatcaatgaaatgtgtcaggaacggtgcgtggacggatgctcgtgcccggagggacaacttctcgatgagggactgtgcgtggaaagcaccgagtgcccttgtgttcactcgggaaaacggtaccccccggggacttcgctgtcacgggattgtaatacgtgtatctgccgcaactcgcagtggatctgtagcaatgaagaatgccctggagaatgtctggtcactggccagtcccactttaagtcatttgataatagatacttcactttctcaggcatctgccaatacctcctcgcccgcgattgtcaagatcattccttttccatcgtgatcgagacggtgcagtgtgcggacgatcgcgatgcggtgtgtactcggtcggtcactgtccgcctgccgggattgcataactcgctggtcaaactcaaacatggagccggggtcgcaatggacgggcaggacgtgcagctgccgctgttgaaaggcgacctgcggatccaacatacggtgaccgcgtcggtcaggctgtcctacggcgaagatctgcagatggactgggacgggagaggacggctgcttgtgaagctgtcccccgtgtacgcgggaaagacttgcggcctctgcggaaattacaatggaaaccagggcgatgattttctcaccccatcaggcttggccgagccacgggtggaagattttggtaatgcttggaagctgcatggagattgccaagaccttcagaagcagcattccgacccgtgcgcccttaacccgagaatgactcggttctctgaagaagcatgcgcggtgctgacctccccgaccttcgaggcttgccaccgggcagtctcaccgctgccataccttagaaactgccgatacgacgtctgttcatgctcggacggtcgtgagtgcctgtgcggcgccttggcgagctacgcggccgcatgcgccggaagaggagtgcgcgtggcctggagagaacctgggagatgcgagttgaattgtccgaaaggccaagtgtaccttcagtgtgggaccccgtgtaacttgacctgccggagcttgtcgtacccagacgaggaatgcaatgaggcctgtctggagggctgcttctgtccaccgggactgtacatggacgaacgcggggactgtgtccccaaagcacaatgcccatgctactacgacggcgagattttccaaccagaggatatcttctccgaccatcacaccatgtgctactgcgaggacgggttcatgcactgtaccatgtcgggagtcccaggctccctcctcccggacgcggtgctgtcatccccgctgtcccacagatccaagcggagcctgtcgtgtcggccaccgatggtgaagctggtatgccctgcagataatctgcgggccgaaggattggagtgcactaagacttgtcaaaactatgatctcgaatgcatgagcatgggatgtgtgtctggctgtctgtgcccaccagggatggtccgccacgagaaccgctgtgtggctctcgaacgctgcccatgctttcaccaaggaaaagaatatgcgccgggtgagactgtgaagatcggatgcaacacttgcgtctgtcaagaccgtaagtggaattgcaccgatcacgtgtgcgacgcgacttgctcaaccatcggcatggcgcactacttgaccttcgacgggctgaagtatctgtttcccggagaatgccagtacgttctggtgcaggactactgcggatcaaatccaggtacgttcagaatcctggtggggaataagggctgctcgcacccatcggtgaagtgcaagaagcgcgtgaccatcctggtggagggaggagagatcgaactgttcgacggcgaagtcaacgtgaaacggccaatgaaggacgaaacgcatttcgaagtggtggagtcgggacgttacatcatcctgctgctcggaaaggcgctgagtgttgtgtgggatagacacctgagcatctccgtcgttttgaaacagacttaccaagaaaaggtctgcggactttgcggaaatttcgatggaatccagaataacgatctgacttcctcaaatcttcaagtggaagaggacccagtcgacttcggaaactcctggaaggtgtcatcccagtgtgccgacactcgcaaggtccccctggacagctcgcccgccacctgccacaacaacatcatgaaacagaccatggtcgactcctcgtgccgcatactcactagcgacgtgtttcaggactgcaacaaactggtggacccagagccctacctggacgtgtgcatctacgatacctgtagctgcgaatcaatcggagactgcgcctgtttctgcgacactatcgctgcctacgcccacgtgtgcgcacagcatggaaaagtggtcacctggagaacggccaccctgtgtccccagtcgtgcgaagaaagaaatttgagagaaaatgggtacgaatgtgaatggagatacaattcgtgtgcaccggcttgtcaagtcacctgccaacatccagagccactggcatgtccagtgcagtgtgtggaaggatgtcatgcccactgtccccctggaaagatcctggacgaactgctgcaaacctgcgtggacccggaggactgcccagtatgtgaagtcgcgggacgcaggttcgcgtcaggaaaaaaggtgaccctcaacccctccgacccagagcactgccagatctgtcattgcgacgtggtgaatctgacctgcgaagcgtgccaggaaccaggcggcctggtggtccctcctactgatgcaccggtgtcccctaccaccctctatgtcgaggacatctccgagccgccgctgcatgatttctactgctcgcgcctgctggacctcgtctttctgctggacggatcaagccggttgagcgaagcagaattcgaggtgctgaaggcgtttgtcgtggacatgatggagcggctgcgcatcagccagaagtgggtgcgggtggccgttgtggaataccatgacggttcacacgcatacatcggactgaaagacagaaagcgcccgtccgaactccgacgcatcgccagccaggtgaaatatgcaggaagccaggtggccagcaccagcgaggtgcttaagtacaccctgttccagatcttttcgaagatcgacagaccggaggcgtctaggatcactttgctcctgatggcttcccaagagcctcaacgcatgtctcggaatttcgtgagatacgtccagggactgaagaagaaaaaagtgatcgtcatcccggtggggatcggaccacacgcgaatctcaagcagatccggctcatcgaaaagcaggctccggaaaacaaggctttcgtgctgtcgtcggtggatgagctggagcaacaacgcgacgaaatcgtgtcgtacctctgcgacctggcgccggaagcgcctccgccgactctgcccccggacatggcacaagtcactgtgggacccggcctgctgggagtgtccaccctgggtccgaagcggaattccatggtgctcgatgttgccttcgtgctggagggttctgacaagattggtgaggcagacttcaatcgctcgaaggaattcatggaggaagttatccagcgaatggatgtgggccaagacagcatccacgtcactgtgttgcagtactcctatatggtgaccgtggaatatccattttcggaagcccagtccaagggtgacatcctgcagcgcgtccgcgaaattcggtaccagggcgggaatcgcacgaataccggactggccctgcgctacctttccgaccactccttcctcgtgtcccaaggggaccgggaacaggctcccaacctggtttacatggtcactgggaatccagcctcagacgagatcaaacggcttccgggagatatccaggtcgtgccgatcggagtggggcctaacgcaaacgtccaagaacttgaacgcatcgggtggcctaacgcgcctatcctgatccaggatttcgaaaccctgccgagagaagccccggatctggtgctccagcgctgttgcagcggggaaggtctgcagatcccgactctgagcccggccccggactgcagtcagccgctggacgtgattttgctgctcgacggttcttcgtcattcccggcttcctacttcgatgagatgaaatcctttgccaaggccttcatttcgaaggcgaatatcgggccccggctcacccaagtgtccgtgctgcaatacggatccatcaccactatcgacgtcccctggaatgtcgtgcctgaaaaggctcacctgctgtcactggtggacgtgatgcagcgcgaggggggaccgtcccagatcggagacgctctgggattcgcagtcagatatttgacttccgagatgcacggggcaagaccgggagcatcaaaggccgtggtgatcctcgtgaccgacgtgagcgtcgactcagtcgatgctgcggccgacgctgctcgatccaatcgcgtgacggtgttcccgattgggatcggtgatcggtacgacgcggcccagctgcgaatcctcgccggaccggccggagactctaacgtggtcaaactgcagcgcatcgaggacctgccgactatggtgactctcggtaattccttcctccacaagctgtgttctggattcgtgcgcatctgcatggatgaggacggaaacgaaaagcgtccgggagacgtgtggactctgcctgaccaatgtcatactgtaacctgtcagccagatggacagactctgttgaaaagccaccgggtgaattgcgatagaggactgcggccatcgtgtccaaattcccagtcgcctgtgaaggtcgaggaaacctgcggatgtcgctggacctgcccgtgtgtgtgcactggatcgagcacccggcacattgtgacctttgatggacaaaactttaagctgactggcagctgctcatacgtgttgttccagaataaggaacaggatctcgaggtgattctgcataacggcgcctgtagccctggcgctcgccagggttgcatgaaatcaattgaagtcaagcactccgcgctctccgtcgagctccactccgacatggaggtcactgtgaatggaaggctcgtgtccgtcccctacgtgggaggaaatatggaggtgaacgtgtacggagcgatcatgcatgaagtgcgcttcaatcacctgggccacatcttcacttttacgccccagaacaacgaatttcagctgcagctcagccctaaaaccttcgcatccaagacttacggtctgtgtggcatctgcgatgagaacggagctaacgacttcatgctgcgcgacggaactgtgaccaccgattggaaaaccttggttcaggaatggaccgtgcagcgcccgggtcaaacttgccaaccaatcctggaagaacagtgtctggttccggacagctcccattgccaggtgctgctgctcccactgttcgctgaatgccataaggtgctggcaccggcaactttctacgccatttgtcagcaagactcgtgccaccaagaacaagtgtgcgaggtgatcgcatcctacgcccatttgtgcagaaccaatggagtgtgcgtggattggcgcaccccggatttctgtgccatgagctgcccaccatcacttgtgtacaaccattgcgaacatggatgcccgcggcactgcgacggcaatgtgtcctcctgcggcgatcatccctcagaaggatgcttctgcccgccggataaagtgatgctggaaggctcctgcgtgccagaagaagcgtgcactcagtgcatcggagaggatggagtgcagcaccagttccttgaggcctgggtgcctgatcatcagccgtgccagatctgcacctgcctgtcgggaagaaaggtgaactgcactacccagccatgtcccacggccaaggctccgacctgtggactgtgcgaagtggcgcgattgcgccaaaacgccgaccagtgctgtccagaatatgagtgcgtctgcgacccggtgtcctgcgatcttcctcctgtcccccactgcgagcgggggctgcagccaactctcaccaacccgggagagtgccgtccgaactttacctgcgcatgcaggaaagaggaatgcaaacgggtgtcgccaccttcctgcccaccacaccgcctgccgacccttcggaaaactcaatgttgtgatgagtatgaatgcgcgtgcaactgcgtgaattcgaccgtgtcatgtccgcttggatatctggcttcgaccgcgaccaatgactgtggctgtactactaccacttgtctgccggacaaggtgtgtgtgcataggtcgactatctacccggtgggacagttttgggaggaggggtgcgacgtgtgtacctgcaccgatatggaagatgccgtcatggggctgcgtgtggcgcagtgttcgcaaaagccgtgtgaagattcgtgtaggtcgggcttcacgtacgtcctccacgaaggagaatgctgcggacgctgcttgccgtcagcgtgcgaggtcgttaccgggagcccacgcggtgattcacaaagctcctggaagtcggtgggttcgcagtgggccagcccggaaaacccgtgcttgatcaacgagtgcgtcagagtcaaggaagaggtattcatccagcagcggaacgtctcctgcccgcagctggaagtccccgtttgcccctcgggattccagctgtcgtgcaagactagcgcttgctgcccttcctgcaggtgcgaacggatggaagcctgcatgctgaatggaactgtgataggaccgggaaaaaccgtgatgatcgacgtctgcactacttgcagatgcatggtccaggtcggggtgatctcagggttcaagctcgaatgcaggaaaaccacgtgcaatccgtgtccgctgggctataaggaagaaaacaacaccggagagtgctgcggaagatgcctgcctactgcttgcaccatccagcttcggggaggacagattatgaccctgaaacgggatgaaaccttgcaggacggatgcgatacccatttctgcaaggtgaacgagagaggggaatacttttgggaaaagcgcgtgactggttgtccaccattcgatgagcacaagtgcctcgcggagggtggaaagatcatgaagatccccggcacgtgttgcgacacttgtgaagagccagaatgcaatgatatcaccgcacgcctccagtacgtcaaggtggggtcttgcaagtccgaggtcgaagtggacatccactactgtcagggaaaatgcgccagcaaggccatgtactcgatcgacatcaacgacgtgcaagaccaatgctcctgctgttcccctacccgcactgagccgatgcaggtggcactccattgcaccaacggcagcgtcgtgtaccacgaagtgctgaatgcgatggagtgcaaatgcagcccaagaaagtgcagcaaa

SEQ ID NO: 21359 - DNA, 8439 bp, synthetic construct
  misc_feature 1..8439: note = source = /note="Description of Artificial Sequence: Synthetic coding sequence"
  source 1..8439: mol_type = other DNA
atgattcctgcacgcttcgctggcgttctactagctttggcgctgattctgccaggcaccctctgcgccgagggcacccgtggcaggtcctccacagcccggtgctcattatttggctccgacttcgttaacacgtttgacggtagtatgtattccttcgctgggtattgctcatatctactagcaggaggctgccagaaaaggagcttcagcattattggagattttcagaatggcaaacgggtgagcctgtctgtctatctgggagagttcttcgatattcacctgttcgtgaatgggacggtaactcagggggaccagcgtgtctccatgccctatgcctccaaagggttgtacctggagaccgaggccggctactacaagctaagcggcgaggcctatgggttcgttgcaaggattgacggcagcgggaatttccaggtgctcttgtctgacagatatttcaacaagacctgcggcctctgcggaaatttcaacatttttgcggaagacgactttatgactcaagaaggaactctcacttcagatccatatgatttcgcgaattcttgggcactctcttctggagaacagtggtgcgagcgcgctagtcccccctcctctagttgcaacatctcttccggcgagatgcagaaaggcctttgggagcagtgtcagctgttgaaatctacttcagtgtttgcccggtgccacccacttgttgaccctgagcctttcgttgctttgtgcgagaaaacgttatgtgagtgtgcaggaggactggagtgtgcttgccctgccttgctggagtatgctcggacttgcgcccaggagggtatggtgttgtatggatggacagaccattcagcttgttctcccgtgtgtccggcggggatggagtatcgacagtgcgtgagtccgtgcgccagaacttgtcaatcactccatatcaacgagatgtgtcaggaaagatgcgttgacggatgtagctgtcctgaagggcagcttctggatgaaggcctgtgcgtggagagcacagagtgtccttgcgtccacagtgggaagagatatcctcccgggacctcattatcacgggattgcaacacctgtatttgccgcaattcccagtggatctgcagtaatgaggaatgcccaggcgaatgcttggttactggccagtcacacttcaagagcttcgacaatagatattttactttctcaggtatttgtcagtacctgttagctagggattgtcaagatcactccttttcaatcgtcatcgaaacggttcagtgcgcggatgaccgcgacgccgtatgtacgcgttccgtgactgttagactacccggtcttcacaactctctagtgaagctgaagcacggggccggcgtggctatggacggacaggatgttcaactccccctactgaaaggtgatcttagaatacagcacactgtcacagcgagcgtcaggttatcgtacggagaggatctccagatggactgggacggccggggtcgtctccttgttaagctgagccccgtgtatgccgggaaaacatgtggactgtgcggcaactacaatggaaaccaaggtgatgattttttgacgcctagcggccttgccgagcctagagtggaggatttcggcaacgcttggaaactgcacggcgattgtcaggacttgcagaagcaacacagtgatccttgcgcactgaacccacggatgacaagattttctgaagaggcttgtgctgtcctaaccagtcctacatttgaagcttgccatagagccgtatccccgttaccatatctgcggaactgccgatacgatgtttgttcctgttcggacggccgcgaatgtctgtgcggggcactggcctcttacgccgccgcatgcgcaggccgaggtgtacgtgtcgcgtggcgcgaaccgggacgctgtgagcttaattgtccaaaaggccaggtctatttgcaatgcggcactccctgtaacctaacttgccgcagcctctcataccccgacgaggagtgcaatgaagcttgtctcgaggggtgtttctgtccccccgggttatacatggacgaacgcggtgattgtgtgcccaaagctcagtgcccatgttactacgacggggagatcttccagcccgaggatatctttagtgaccaccatactatgtgctactgcgaggacggttttatgcattgcaccatgtccggggtgcctggcagcctgctgcccgacgctgtcctgtcgagtccgctgtcacaccgcagtaaacggtcactgtcctgtcggccaccaatggtaaagctagtatgtcccgccgacaacctccgcgccgagggtttagagtgcacaaagacttgtcagaactacgacctggaatgtatgagtatggggtgtgtatcagggtgtctgtgcccccctggaatggtgaggcacgagaataggtgtgttgcacttgagaggtgtccttgctttcatcaaggcaaggaatatgcgccaggagagaccgtgaagattggctgtaatacatgtgtgtgccaggaccgaaaatggaattgtacagaccatgtctgcgacgccacgtgcagcacaattggcatggcccactatctgacctttgacggcctgaagtatctgtttcccggcgagtgccagtacgtgctggttcaagactactgcggaagcaatccggggacctttcgcatactggtggggaataaaggttgcagtcatccttctgtgaagtgcaaaaaacgggttaccatactggtagagggcggggaaatcgagcttttcgatggagaagtgaacgtgaaacgccctatgaaggacgaaacacacttcgaggtcgtcgagtcgggacgatacattattctgctgttgggaaaggctctttcagtagtgtgggatagacatctttccatttcggtcgttctgaaacagacttatcaagaaaaggtttgtggattgtgcggtaacttcgacggcattcagaataatgatctgacctcctcaaacctgcaggttgaagaggatcctgtggattttggcaattcttggaaggtgagctcccagtgtgcggacacccgcaaagtccctctggatagcagccccgccacgtgtcacaacaatattatgaaacaaaccatggtagatagcagttgtaggattttaacaagtgacgtgttccaagattgcaataaactcgtcgatccagagccctacctagatgtgtgtatctatgatacttgtagctgcgaaagtatcggagactgtgcctgcttttgcgataccatcgcagcctacgctcatgtgtgcgctcagcatggcaaggtggtcacttggcggacagccaccctctgccctcaaagttgtgaagagagaaacctgagagagaacgggtacgaatgcgagtggcggtacaacagttgtgccccggcatgtcaggtcacgtgccagcaccccgaacccctagcgtgccctgtacagtgtgtagaaggttgccatgcccactgcccgcctgggaagattctcgacgagttgctccagacgtgtgtagacccagaggattgcccagtgtgcgaagtggccgggcgcaggttcgcctcggggaaaaaggtgacactgaacccgtctgaccctgaacactgccagatctgccattgcgacgttgtgaacctgacctgtgaggcctgccaggaaccaggagggctggtggtcccacctaccgatgcccctgtttctcctacgactctgtatgtggaggacattagcgaaccacccttacacgacttttactgttcacgcctcctggatttggtgttcctgttggatgggagttctaggctgtcagaggcggagttcgaagtcttaaaagccttcgtagtggacatgatggagcggttgcggattagccagaaatgggtgcgggtcgccgtggtagagtatcatgacggatcacacgcttatatcggcctgaaagatcggaaacgcccgtccgaattgcgtagaatcgcttcacaggtcaaatatgccggatctcaggttgcgagtacaagcgaagtactcaaatataccttgtttcagatcttttccaagatcgacaggcctgaggccagccgcattaccttgcttttgatggctagccaggagcctcagcggatgagccggaactttgtccgctatgtacaaggactgaaaaaaaagaaggtgatcgtaattcctgttggaataggccctcatgccaaccttaaacagattcgcctaatagaaaagcaggcgcccgaaaacaaggccttcgtattgtcctcggtggatgaactggaacagcaacgtgacgagatcgtatcctacctgtgtgaccttgctccagaagcccccccccctactcttccaccggacatggcacaggtcactgttggacccggtctgttgggcgtgtctaccctagggcccaagcgtaactcgatggtcctcgatgtggccttcgtgttagaagggagcgacaagattggagaggccgacttcaacaggtcaaaagaattcatggaggaggtgatccagcggatggatgtgggtcaagactccattcacgttacagttttgcagtactcgtacatggtcaccgtagagtaccccttctccgaagctcagagcaaaggagacattctgcagcgtgttcgcgagatccgttatcagggcggcaaccggacaaacacgggtctggccttaagatatctcagcgatcactctttcctcgtgtcacaaggagaccgggaacaggcccctaacctggtctacatggtgaccggaaatcccgctagcgacgagataaagaggctcccaggagacatccaggtcgtgcctattggcgtcgggcccaacgcaaacgtgcaagaactggagaggatcggatggcccaatgcccccatcctgattcaggactttgagacattgcctcgagaagcgcctgatttagtgctccagcgttgctgttccggcgaaggcctccagatcccaacactcagccctgctcccgactgtagtcagcctctcgacgttatcctcctgctggacggttcttccagtttccctgccagttatttcgatgaaatgaagtcattcgctaaggcatttatttccaaggctaatattgggcctcggctgactcaggtcagcgtcttgcagtatgggagcattacaacgattgacgtgccttggaatgtggttcccgaaaaggcccatttactcagtctggtggacgtcatgcagcgcgagggtggcccgtctcagataggggacgccctcggattcgccgtgcgctacctcacgagcgagatgcacggagcccgcccgggcgcgtcgaaagctgtcgttatactcgtgaccgacgtatcagtcgattccgtggacgcagctgctgatgcagctagaagtaatcgagtcacagtgttcccaattggcatcggtgaccggtacgacgccgctcagttgcgaatcctagctgggccggccggcgattctaatgtggtgaaacttcagcgcatcgaagacctgcccaccatggtcaccctgggaaactcatttttgcacaaactctgcagcggcttcgtgcgcatatgcatggacgaggacggcaatgagaagagaccaggagacgtgtggaccctgcccgatcagtgccacactgtgacctgtcagcctgacggacagacacttcttaagagccatagggttaattgcgatagggggctgagacccagctgccctaactcgcagagtccagtgaaggtcgaagagacatgtgggtgcagatggacttgcccctgtgtttgcaccggttcatcgactcggcatatagtgacgttcgatgggcaaaacttcaagctaaccgggtcatgttcatacgtgctcttccagaacaaggagcaggacctcgaggtgattcttcataatggtgcatgttcaccaggcgccaggcagggttgtatgaagtccatagaggtcaagcattctgcattgtccgtggagctgcactccgacatggaagtgaccgtgaatgggcgcctggtgtctgtgccttatgtcggcggcaatatggaagtgaacgtgtatggcgccataatgcatgaggtacggtttaatcacttggggcacatttttacatttacaccgcagaataatgaattccaactgcaactgtcacctaagacatttgcctccaagacttatggtttgtgtggtatttgtgacgagaacggcgccaacgatttcatgcttcgggacggcacagtgactactgattggaagacactggtgcaagaatggaccgtccagaggccaggccagacgtgccaacccatcctggaggaacagtgcctggtaccggatagctcccattgtcaggtgttgcttctgcccctatttgcggagtgtcacaaggtgctggctcccgcaactttttatgccatatgccaacaggacagctgccaccaggagcaggtgtgcgaggtgatcgcttcctatgcccatctgtgtcgcaccaatggagtttgcgtggattggcggaccccagatttttgcgccatgtcctgccctcccagccttgtctataatcattgtgagcatggatgccccaggcattgcgatggcaatgtgtcatcctgcggcgatcacccatccgagggctgcttctgccccccggataaggttatgctggagggttcatgcgtccctgaagaagcttgcacccagtgcatcggcgaggacggagtccagcaccagtttctggaggcatgggtgccagaccaccagccctgtcagatctgtacatgcctgagtggtagaaaggtcaattgtaccacgcaaccctgtcctacagcaaaagcccctacgtgcgggctatgtgaagtggcccggttacggcaaaacgcagaccaatgttgtccagagtacgaatgcgtgtgtgatcctgtgtcctgtgatcttcctcctgttccccactgcgaacgaggactccagccaaccttgactaacccaggtgagtgccgaccaaactttacttgcgcttgtaggaaggaggagtgtaagcgggtgtctccccccagctgtccaccccatagacttcccaccttgaggaaaacccagtgctgcgatgagtacgagtgtgcctgtaattgtgtgaactctacagtcagttgtcctctggggtatctggctagtaccgcaaccaatgactgtgggtgcacaactaccacgtgcctcccagataaggtgtgcgtgcaccgcagcaccatctaccccgtgggccagttctgggaggaaggttgcgatgtctgtacatgtactgacatggaggatgccgtcatgggactcagagttgcacaatgcagtcagaaaccctgtgaagattcttgtcgatccggttttacatacgttctgcatgaaggcgagtgctgcggccggtgtttgccttcagcctgcgaagtggttacagggagccccagaggagactcccaatcaagctggaagagcgtggggtcccagtgggcctcccctgagaacccctgcctgattaatgaatgtgttcgagtgaaagaggaagtttttatccaacagcgtaatgtctcttgcccccagttggaagtacccgtatgcccaagtgggttccagcttagctgcaagacctcagcttgttgtccgagctgtaggtgtgaacgtatggaagcgtgtatgcttaacgggacggtgatcggccctggcaaaaccgtcatgatagacgtctgtaccacatgtcgctgtatggtgcaggtaggggtgatatctggctttaagcttgaatgtcgcaagaccacttgcaatccatgcccgctggggtataaggaggagaataacaccggcgagtgctgtggtcggtgcctcccgacagcgtgtactattcagctgcgcggcggtcaaattatgacattgaaaagagacgagacactccaggacgggtgcgacacacacttctgcaaggtcaacgagcggggggagtatttctgggaaaagcgggtgacaggctgccccccattcgatgaacacaaatgcttggccgaaggtggaaagatcatgaaaataccagggacatgttgtgatacttgtgaagaacccgaatgcaatgatatcactgcaaggctgcagtacgtgaaggtggggtcttgtaagagcgaggtggaagtggatatccactactgccaggggaagtgtgccagcaaagccatgtactccattgatattaacgacgtgcaggaccagtgtagttgttgctcacccaccagaactgaacccatgcaagtggctctccactgcactaatggcagcgtggtttaccacgaggtgctgaacgccatggagtgcaaatgtagtccaagaaagtgctccaaa

SEQ ID NO: 21360 - DNA, 8439 bp, synthetic construct
  misc_feature 1..8439: note = source = /note="Description of Artificial Sequence: Synthetic coding sequence"
  source 1..8439: mol_type = other DNA
atgattcctgcacgcttcgcaggtgtcctccttgcgctggccctgattctgcccggaaccctctgtgcagaaggtactcgcggacgctcctcgactgctagatgttccctgtttggtagcgacttcgtgaacacgttcgatggctctatgtactcgtttgcaggatactgttcctacctgctcgcagggggatgtcagaagcggtccttttccatcattggagattttcagaatggtaagcgagtgtcactttccgtgtaccttggagaattcttcgacattcatctcttcgtgaatggcaccgtgacccaaggggatcagagagtatcaatgccttacgccagcaagggactctaccttgaaactgaggcgggatactacaaacttagcggcgaggcctacggttttgtggcgaggatagatggatcgggaaatttccaagtgctgctttccgatcggtacttcaataagacctgtggactgtgtggtaactttaacattttcgcagaggatgactttatgactcaggaagggaccttgacctccgacccatacgattttgcaaactcgtgggcactttcgtccggtgagcagtggtgtgagcgggcttcacctccttccagctcgtgcaacatatcatcaggagagatgcaaaaaggcctgtgggaacaatgtcaactgctcaagtcgacttctgtgttcgcaagatgccacccactcgtcgatccagaaccttttgtggcgctttgtgaaaaaacgttgtgtgaatgcgcaggcggacttgaatgcgcctgtcctgccctgttggaatacgctagaacttgcgcacaagaaggaatggtgctctatggatggaccgaccattcggcttgttcgccggtctgtccagcaggtatggaatacagacaatgtgtgtcaccgtgtgcccggacttgtcaatctcttcacattaacgaaatgtgtcaagagagatgtgtcgatggatgttcatgcccagaaggtcagctgcttgatgaaggcctgtgtgtggaaagcactgaatgtccttgtgtccattcgggaaagagataccctcctggcacgagtctctcccgcgattgtaacacctgtatctgtcgcaactcccagtggatctgttcaaatgaagaatgcccaggagaatgcctggtgaccgggcagtcgcacttcaagtcctttgataacaggtactttaccttttcgggaatttgtcaataccttttggcccgcgactgtcaagatcattcattctccattgtcattgaaacggtccaatgtgcagatgatagagacgctgtgtgcactcgcagcgtgactgtgcggctgcctggtctgcataacagtctggttaagctgaaacatggagcaggagtcgcaatggacggacaagacgtgcaactccctctcctcaagggtgacctccggattcagcatactgtgaccgcatcggtgcgcctgtcgtacggcgaagatcttcagatggattgggacggcaggggacgacttcttgtcaagctgtcacctgtgtacgcaggtaagacctgcgggctgtgtggcaattacaacggaaatcaaggagacgatttcctgaccccctcaggtcttgcagagcctcgcgtggaagattttggcaatgcctggaagctgcatggtgattgtcaagatctgcaaaagcagcatagcgacccatgcgccctgaacccaaggatgacccgattttccgaagaagcctgcgcagtgctcacctcacctaccttcgaagcgtgtcatagggcagtgtctcctctcccttaccttcggaactgcagatacgatgtctgctcttgctcggatggacgcgaatgcctttgtggggcgttggcaagctacgcagccgcatgtgctggtcgcggtgtgcgggtcgcatggagggagcccggtaggtgcgaactgaactgtccaaaggggcaggtgtatcttcagtgtgggacgccttgcaacctcacgtgtcgcagcctctcgtaccctgacgaagagtgtaatgaagcctgtcttgagggctgcttctgtcccccaggactgtacatggatgaacggggagactgtgtgcctaaggcacaatgtccttgctactacgatggagagatttttcaacctgaggacattttctcggaccatcatacgatgtgttactgtgaggatgggtttatgcattgtaccatgtcgggagtgcctggctccctgctgccagacgccgtcctgtcctcgcctctgtcacacagatcaaaacggagcctttcgtgtagaccccccatggtgaaacttgtgtgtcccgcagacaatttgcgggcagagggtctggagtgcaccaagacctgccaaaactacgatctggagtgtatgtcaatgggttgtgtctccggctgcctgtgtcctccgggtatggtccgacatgaaaataggtgcgtggcacttgaacgctgcccgtgttttcatcaaggtaaggaatacgcacctggcgaaactgtgaaaattggatgcaacacctgtgtgtgccaggacagaaagtggaactgtactgatcacgtgtgtgacgctacgtgttcgaccatcggaatggcacattacctgacctttgacggactcaagtacctgtttccgggagaatgtcaatacgtcctggtgcaggactactgcggatccaatcccggaacttttcggattctcgtcggcaacaagggttgttcacatccttcggtaaaatgtaagaagcgggtcactatcttggttgaagggggagaaatcgaactttttgatggagaggtgaatgtaaagaggccaatgaaggatgaaacccactttgaggtggtggaatcaggtcgttatatcatcctcctgctcggcaaagcgctttcagtcgtgtgggatagacacctctccatttcagtggtcctgaaacaaacctaccaggagaaggtgtgcggactgtgcggaaatttcgacggaatccagaataatgatctcacttcctcaaatcttcaggtggaggaggaccctgtcgatttcgggaactcctggaaagtgtcctcacaatgcgcagatactaggaaagtgcccctggactcctcgcctgcaacctgccacaacaacatcatgaagcagaccatggtggatagtagctgtaggatcctgacctccgatgtctttcaagattgcaataaacttgtggatcctgaaccataccttgatgtgtgtatttacgacacctgctcgtgtgaaagcataggtgattgtgcatgtttttgcgataccattgcggcatacgcacatgtatgcgctcaacacggtaaagtggtgacctggcgaactgcgaccctgtgcccgcaatcctgcgaagagaggaatctgcgagaaaatgggtacgaatgtgaatggcggtataactcctgtgcccctgcatgccaagtcacttgtcagcatccagaaccactggcctgtccagtgcagtgtgtcgaaggatgccacgcacattgtcccccaggcaagatactggacgagctgcttcaaacttgcgtcgaccctgaagattgtccggtctgtgaggtcgcaggccggcggtttgcatctgggaagaaagtgaccctgaacccctccgatccagagcattgtcaaatttgtcattgtgatgttgtgaatctgacttgtgaagcgtgtcaggaacccggtggtcttgtggtgcctccgactgacgcacccgtctccccgactaccctgtacgtggaggacatttcagaaccgcctctgcacgacttttactgctcgcgactcctcgacctcgtctttctccttgatggaagcagcagactctcagaagcagaatttgaagtgctgaaagcatttgtggtcgatatgatggagagacttcgcatctcgcagaaatgggtgagagtagcagtggtggaataccacgatggatcacacgcttacattgggcttaaggatcggaagcgccctagcgagctgcgccgtatagcctcgcaggtgaagtacgcaggatcgcaggtcgcgtcgacctcggaagtccttaagtacacgttgtttcagatattctccaagatagatagaccagaagcctcccggataacccttcttcttatggcatcccaggaaccacagcgtatgtcccggaacttcgtcaggtacgtgcaaggccttaagaagaagaaggttatcgtgattccagtgggcattgggcctcatgcaaacctcaagcagattagactgattgagaagcaggctcccgaaaacaaggccttcgtgctgagctccgtggacgaacttgaacaacaacgcgacgaaattgtctcatacctttgcgatctcgcgcctgaggccccacctcccaccctcccgccagacatggctcaagttaccgtgggaccaggactgcttggagtgtcgactcttgggccaaagcggaactcgatggtgcttgatgtggcgttcgtgctcgagggatccgacaagatcggagaagcagactttaatcgcagcaaagaattcatggaagaggtgattcagcgcatggatgttgggcaggactcgatacacgtgaccgtccttcagtactcgtacatggttaccgtggagtacccttttagcgaggcacagtcgaaaggcgatattctgcaaagagtgcgggagatccgttaccaaggggggaaccgaactaacactggactcgcactgaggtacctttctgaccatagctttcttgtgtctcagggtgatcgtgaacaagcgccaaacttggtctacatggtcactggtaaccctgcatccgacgagattaagcgcctccctggtgacattcaggtggttcctattggcgtcggtcccaacgccaacgtccaggaacttgaacgcattggatggcctaacgcgccgattctgatacaagattttgaaacccttcctagagaggctccggatcttgtgcttcaaagatgctgttcaggggagggactgcagatccctactctgtccccagctcctgattgctcgcagccactggatgtgattctgcttcttgatggatcttcgagtttccctgccagctatttcgatgaaatgaaatcgtttgcgaaggcatttatcagcaaagcaaacattggtcctcgtctcacgcaagtctcggttctgcagtacggttccataactacgatcgatgttccgtggaacgtggtccctgagaaggcccatttgctgtcgcttgtcgacgtcatgcaacgcgaagggggaccgtcacagattggagatgcactgggatttgcggtgagatacctcacttcagaaatgcatggagccagacctggtgcaagcaaggcagtcgtgattcttgtcaccgacgtgtcggtggacagcgtcgatgcggcggctgacgcagcacggtctaaccgcgtgaccgtgtttcctattggcatcggtgatcggtatgatgcagcccaacttcgcattcttgcgggtcctgcaggagatagcaatgtcgtcaaacttcagagaattgaagatctccctaccatggtgaccctgggcaactcatttctgcataaactttgtagcggattcgtgcgtatctgcatggatgaggatggcaacgaaaaaagacctggagatgtgtggactcttcctgatcagtgccataccgtgacttgccagcctgacggtcagacgctgctcaagtcccaccgcgtcaactgcgacaggggactgcgcccctcgtgtcctaactcacaaagcccggtcaaggtggaggaaacttgcggttgccgatggacgtgcccttgtgtgtgcacgggatcgagcactcggcacatagtgacttttgatggtcaaaactttaagttgactgggtcctgttcatatgtgctgtttcagaacaaagagcaagacctcgaggtgatccttcataacggcgcgtgcagccctggggcaagacaaggatgtatgaagtccatcgaagtgaagcattccgctctgagcgtcgaacttcacagcgatatggaagtgaccgtgaatggcagacttgtctccgtgccatacgtgggtggtaacatggaggttaacgtgtacggagcaattatgcacgaggtgcgtttcaaccatctgggacacatctttacctttactcctcaaaacaatgaatttcagctccaactttcgcctaagactttcgccagcaagacctatggactttgtggcatctgcgacgaaaatggagccaacgatttcatgctgcgcgatggtaccgtgactactgactggaaaactctggtgcaagaatggactgtgcaacgccccggtcagacgtgtcagccaatactcgaagagcagtgtctggtgcccgatagctcgcactgccaggtcctgcttctcccgctttttgcagaatgccataaagtcctggcgcctgcgaccttttacgccatatgtcaacaggactcatgccatcaagaacaagtgtgcgaggtgatcgcatcctacgcacacctgtgtaggaccaacggtgtctgtgtcgactggagaacccccgatttttgcgcaatgtcgtgcccaccatcgctggtgtacaaccattgtgagcatggttgccctcggcattgtgatgggaacgtgagctcatgcggcgaccaccctagcgaaggatgtttctgtccacctgataaggtcatgcttgaaggaagctgtgttcccgaggaagcgtgtactcagtgtatcggtgaggacggtgtccaacatcaatttctcgaagcctgggtccctgatcaccaaccttgtcagatatgtacttgtctctcaggacgtaaagtgaattgcaccacgcaaccgtgtccaaccgccaaggcaccaacctgcggattgtgtgaagtggcgcggcttcgacagaacgcggatcagtgctgcccagaatacgaatgtgtgtgtgatcctgtcagctgcgatctcccccctgtccctcactgcgagaggggactccaaccaactcttaccaatccgggtgagtgtagacctaactttacctgcgcatgtcgcaaggaagaatgtaagcgcgtcagccctccatcatgtcctccacacagactgccgactctcagaaagacgcagtgttgtgacgagtacgaatgtgcatgtaattgtgtgaacagcactgtgtcttgtccactgggttacctggcctccactgcgaccaacgattgcggttgcacgactaccacctgtttgccagataaggtgtgtgtacatagatcgactatctaccctgtgggacaattctgggaggagggatgtgatgtgtgcacctgcaccgatatggaagatgcagtgatgggattgcgcgtcgcccaatgttcgcaaaagccttgcgaagattcgtgccggtcagggtttacctacgtgcttcacgagggcgaatgttgcggtcggtgccttccgtccgcttgtgaggtggtgactggatcgcccagaggcgattcccaatcttcttggaagagcgtgggctcgcaatgggcaagcccagaaaatccatgcctcattaatgaatgtgtgcgagtgaaggaggaagtattcatccaacagagaaacgtctcgtgtccacaactcgaagtgcccgtgtgtccatcaggatttcaactctcgtgtaagactagcgcatgctgcccgtcatgtcgctgcgagcgcatggaagcctgtatgttgaatggaactgtcattggcccaggaaagactgtgatgatcgatgtatgtaccacttgcagatgtatggtgcaggtgggcgtcatttccgggtttaaactcgagtgtcgaaaaaccacttgcaatccctgtcctctggggtacaaggaggaaaacaatactggagaatgttgtgggcgctgccttcctacggcctgtacgatccagcttcgcggaggtcaaatcatgactcttaagcgcgatgaaactcttcaagatggatgtgatactcacttctgtaaggtgaacgagagaggtgaatacttttgggaaaagagggtcactggatgtccaccattcgacgagcataagtgtcttgctgaaggagggaagattatgaaaatccctgggacctgttgcgatacctgtgaagaacctgaatgcaatgacattaccgctcgacttcagtatgtgaaggtggggtcatgtaaatcggaggttgaggtggatattcattactgtcaagggaagtgtgctagcaaagcgatgtactcgattgacattaatgatgtccaagaccaatgttcctgttgttctccaacccgtactgaacctatgcaagtggcactccattgcaccaatggttcggtcgtttaccatgaggtgttgaatgcaatggaatgtaagtgttcaccaagaaagtgtagcaag

SEQ ID NO: 21361 - DNA, 8439 bp, synthetic construct
  misc_feature 1..8439: note = source = /note="Description of Artificial Sequence: Synthetic coding sequence"
  source 1..8439: mol_type = other DNA
atgatcccagctagatttgcaggcgttctgctcgccttagccctcattcttcctggcacattatgtgccgaggggacgcgcggaaggtcttctacagcaagatgttctctgtttgggagcgactttgtgaacacctttgatggctccatgtattcttttgcaggctactgcagctatctgcttgcagggggatgccagaaacgttcatttagcattattggcgatttccaaaatggcaagcgggtttctctgtccgtctacctgggagagttttttgacatccaccttttcgtgaacggaacagttactcagggggaccagagggtctctatgccttacgcaagtaagggactgtacctggaaacagaagctgggtattacaagctcagcggcgaagcatatggcttcgtggcacgcatcgacggaagtggcaacttccaggtactgctttcagaccggtattttaacaagacctgcggcctttgcgggaatttcaacatctttgccgaggatgatttcatgacccaggaaggaaccctcacttctgacccatacgactttgctaactcatgggcactttcgtctggagaacagtggtgtgaaagagcctcaccgcccagcagtagctgcaacataagctccggagagatgcagaaaggcttgtgggaacaatgtcagttgctgaagagcaccagcgtgttcgcacgatgtcatcccctcgtggacccggagccttttgttgctctttgtgagaagaccctgtgcgagtgcgcaggcgggttagaatgtgcctgccctgctctgttagaatacgccaggacctgcgctcaggagggaatggtgttgtacggctggaccgatcactccgcttgcagccctgtctgcccagctggcatggaatacagacagtgtgtaagcccctgtgcccgcacctgccaatcacttcacatcaatgaaatgtgccaggaaaggtgcgtggatggatgcagttgtcccgaaggacaactcctagatgaaggtctatgcgtcgagagtaccgagtgtccatgcgtgcactctggcaagcgctatccccctggcacatccctcagtcgtgactgcaacacatgcatttgtagaaactcacagtggatttgtagcaacgaggaatgccctggagagtgcttggtcacaggtcaatctcatttcaagagtttcgacaacagatactttactttcagcgggatatgtcaatacctgttggcccgtgattgccaggaccattcatttagcatcgtgatcgaaaccgtccagtgcgccgacgatagggacgcggtgtgcacgaggtctgttaccgttaggctcccaggactgcacaacagcctcgtaaagctgaagcacggagctggagttgccatggatggtcaggatgtgcaactgccactgcttaagggcgacctgagaattcaacacacagtgaccgctagcgttagacttagctacggcgaggatctgcaaatggactgggatggacgaggaaggctgctggttaagctgagtcccgtttacgcgggaaaaacgtgcggattatgtgggaattacaacggtaaccagggagacgatttcctgacccctagcggcctggctgagccgagggtcgaggactttggcaacgcttggaaactccacggcgactgccaagacctccagaaacaacatagtgacccttgtgcgctcaatccaagaatgacccgcttctcagaagaggcgtgcgcagtgttgaccagcccgacttttgaggcttgtcatcgggctgtaagtcctcttccttatttgcggaactgccgctatgatgtttgcagctgtagcgatggccgcgagtgtctctgcggggctttggcaagctacgccgcagcatgtgcgggaaggggtgtaagagttgcctggcgcgagcctggaagatgtgaacttaactgccctaaaggacaagtttacctgcagtgcggtacaccttgtaacctgacatgccgtagcctgtcttacccggacgaagaatgcaatgaggcttgcttggagggctgtttctgcccccccgggctttacatggatgagaggggcgactgtgtgccaaaagcccagtgcccttgctactatgatggcgagatcttccagccagaggatatcttttccgatcaccacacaatgtgctattgcgaggacggctttatgcactgcaccatgtcaggagtgcccgggtccctgctgcccgatgcagtcctttctagccctcttagccaccgcagtaagcgctccctgagctgcaggcctcccatggtcaaactggtctgccccgcagataatttaagagcagagggactcgaatgtacaaagacatgccaaaactatgaccttgagtgcatgagcatgggctgcgtctcaggctgcctgtgcccccctggaatggttcgacatgaaaaccggtgcgtagcactggaaagatgcccttgctttcaccagggaaaagaatacgcacctggcgagaccgtgaaaattggatgcaacacctgtgtgtgtcaagatagaaagtggaactgcaccgatcacgtctgcgatgccacatgctctaccatcggaatggcacattacctgacttttgatggattgaaatacctgttcccaggagagtgtcaatacgtactggtgcaagactattgcggaagcaatcccggcacctttcgtatcctcgtgggcaataaaggttgcagtcatccatccgtgaagtgtaaaaagcgcgtcactattctggttgagggaggggaaatcgagctttttgatggagaggtgaacgtgaaaaggccaatgaaggatgagacacattttgaggtggtggagagcggacggtatattatcctccttctgggcaaggctttgagcgtggtttgggatcggcacttgtcaatcagtgtcgtgctgaaacagacttatcaggagaaagtttgcggcctttgcggcaattttgatggcatacaaaacaatgacctcacatcttccaacttgcaagttgaggaagaccctgtggatttcggcaattcctggaaagtctcatcccagtgtgctgatacacggaaagtgccactggatagtagcccagctacctgtcacaacaacataatgaagcagacaatggtggattcctcgtgtcgcattctcaccagcgatgtctttcaggattgcaataaattggtagaccccgaaccctatcttgacgtctgtatctatgatacctgcagctgcgaaagcatcggagattgtgcttgtttttgcgataccatcgctgcttatgcacacgtatgcgcccagcatgggaaggtggtgacatggaggactgcgacactgtgtccccagtcttgtgaggaaaggaatctcagagaaaacggttatgaatgtgagtggcgctacaattcatgcgccccggcctgccaggtgacctgccaacacccagagccgctggcatgcccggttcagtgtgttgaaggatgccatgcacattgccctcctggcaagattctcgacgagctgctccagacatgcgtagatccagaggattgcccagtctgcgaggtggctggcagaaggtttgcctcagggaagaaggttacactcaatccaagcgaccctgaacattgccagatttgccactgtgatgtggtgaatctgacatgcgaggcttgtcaggaaccgggcggactggtcgttccgccaacagatgccccagtctcccctaccaccctgtacgtggaagacatcagcgagccacctctccatgacttctactgtagtaggctgctggatctggtcttccttctggacgggagtagccgcctcagcgaagcggaattcgaggtccttaaggccttcgtggtggatatgatggagagactcagaatcagccagaagtgggtcagggtagccgtcgttgagtatcacgacggatcacatgcgtacatcggcctaaaggacagaaaacgacccagtgagctgcgaagaatcgcgagccaagtcaagtacgctggctcgcaagttgcttctacgtccgaggtcctcaaatatacactctttcagattttttcaaaaattgacaggccagaggcttctaggatcacactactgctcatggctagccaagagcctcaaagaatgagcaggaatttcgtgcgctatgttcagggtcttaagaaaaagaaggtcatcgttattcccgttgggatcggcccacatgctaacctcaagcagatacggctgattgagaagcaggcgccggaaaacaaagccttcgttcttagctccgtcgacgaactggaacaacagagggatgagatcgtgagctatctttgtgatcttgccccagaggctccccctccaacacttccgcccgatatggcacaggtgactgttggcccaggactcctgggtgtctccaccctcggccctaagcgaaactcaatggtcctggatgtagccttcgttctggaaggctctgataaaatcggtgaggctgacttcaaccgctccaaagagttcatggaagaggtcattcaaaggatggatgtgggccaggattctattcatgtgacggttttacaatacagctatatggtcaccgtcgagtatcctttctcggaagcacaaagcaaaggggacatcctacagcgggtaagggaaattcgctatcaagggggaaatcgcacgaacaccggattagccctacggtatttaagcgaccactcgttcttagttagccagggtgaccgcgagcaggctcctaatcttgtatacatggtgaccggaaatccagccagcgatgagatcaaaagactgcccggggatattcaagtggtgccaattggcgtaggacccaatgctaatgtgcaggaactggaaaggatcggatggcctaatgctcccatcctgatccaagatttcgaaacacttcccagggaggcgcccgacttagtcctgcaacgctgctgcagtggggaaggcctgcagatccccaccctttcccctgcacctgactgttctcagcctttggatgtgatcctgttgttggatggttcaagcagttttcctgccagctactttgacgagatgaaatcgttcgctaaggcatttatctctaaggcgaacatcggtccaaggctgactcaggtatccgttctccaatatgggtcaattacgacaatcgacgtgccctggaatgtcgtccctgaaaaagctcaccttttgagtttggtcgatgtgatgcaacgagaggggggcccttcccagatcggggacgctttaggattcgctgtaaggtacttgacaagcgaaatgcacggggcgagaccaggagcgtccaaggccgtggttatactggtgaccgatgtctccgttgattctgttgacgccgccgctgatgccgcgcggtccaacagggtcacagtattcccaatcggcatcggagatagatatgacgcagcacaactcaggatccttgccggaccagccggagactctaatgtcgtgaagctacaacgcattgaggatctccccaccatggtcacactagggaactctttcctccacaaactgtgttctggcttcgtcaggatttgtatggatgaagatggtaatgagaagaggcccggcgacgtctggacactgcctgaccagtgtcacacggtcacctgtcagcctgacggtcaaaccctcctgaaatcacatcgggtgaactgcgatagaggattgagaccctcctgccctaactctcaaagcccggtgaaggtggaagaaacttgcggttgtagatggacttgcccttgtgtgtgtacaggctccagtactagacacatcgtgactttcgacggtcagaattttaagctgacaggaagctgttcttacgtcctgttccaaaacaaggaacaggacctggaagtgatcttgcataatggggcatgttctccaggcgccagacagggctgcatgaaatccatcgaagtaaaacactcagccctgagcgttgagctgcatagcgatatggaggttaccgtcaacggcagactcgtcagcgtcccttacgtcggaggcaacatggaagtgaacgtgtatggggctatcatgcacgaggtgcggttcaaccatcttggccatattttcacgtttaccccacagaacaatgagtttcagttgcagctgagtcctaaaacctttgccagcaagacctacggtttgtgcgggatctgcgatgagaatggcgcaaacgattttatgctcagggacggcactgttaccacggattggaaaacattggtgcaagagtggaccgtgcagaggcctggccagacatgccagcccatcctggaggaacagtgccttgtgcctgacagcagccactgccaggttttgctgctgccgctgtttgcagaatgccacaaagttctcgctccagcaacattttatgctatctgtcagcaggatagctgccatcaggagcaagtctgtgaggtcatagcttcttatgcacatctgtgcagaactaatggcgtctgtgtggactggaggactccagacttctgcgctatgagttgcccccccagcctcgtatataatcattgtgagcatgggtgtcccaggcattgtgatggcaacgtgtcttcgtgcggggaccacccctcagagggctgcttttgtcctcctgataaggtaatgctggaaggatcctgcgttcctgaggaggcatgtacccaatgcatcggcgaggacggggttcaacatcagtttctggaagcgtgggtaccggaccaccagccctgccagatttgtacatgcctgagcgggaggaaagtgaactgtaccacacagccatgtcccacagctaaagcacctacctgcggcctctgcgaagtagcaagactgaggcaaaacgccgatcagtgctgtcctgagtacgagtgcgtctgcgacccggtgtcttgtgatctcccacccgtgcctcattgcgaacgcggactccagccaaccctgactaatcctggggaatgtcgccccaactttacatgcgcatgccgcaaagaagaatgcaagagggtgtcaccaccaagctgccctccccatcggttgccaacactgcgcaaaacacagtgttgcgatgaatacgagtgtgcatgcaactgcgtgaactctaccgtctcttgcccccttgggtatttggcaagcacggcaactaatgactgcgggtgcactaccacgacttgtctgcctgataaggtctgcgtgcataggtctactatctaccctgtggggcaattctgggaggaaggctgcgatgtttgcacatgtactgacatggaagacgccgtgatgggacttagagtcgctcaatgtagtcaaaagccctgcgaagattcatgccgcagcggcttcacctacgttcttcacgagggtgagtgttgcggaaggtgcctgcccagtgcatgcgaagtggtgacaggtagtccccgcggagattcacaaagctcctggaagagcgtgggctcccaatgggcctctccagaaaacccctgcctcatcaatgagtgtgtcagagtgaaggaggaagtattcatacagcagcgcaatgtgtcatgtccccaactggaagtccctgtttgccccagcgggttccaactcagttgtaaaacttctgcctgctgcccaagctgtaggtgcgaaaggatggaagcgtgtatgcttaacggcacggtgatcgggccaggtaaaactgtcatgatcgacgtgtgcacgacctgcaggtgcatggtacaggtgggagtgatatcaggattcaagctggaatgcaggaagactacatgcaatccttgtcctctcgggtataaggaagaaaacaatacaggagagtgctgcggacggtgtctccctacagcttgcactatccagttaaggggaggtcaaattatgacactgaagcgtgacgagacattgcaggacggctgtgacacacatttctgcaaggtcaatgaaaggggtgagtacttctgggaaaagagggtcacaggctgccctccatttgatgaacataagtgtctggccgaaggcggaaaaattatgaagatccctggtacctgttgcgacacttgcgaagaacctgagtgtaacgatatcaccgcccggctccaatacgtcaaagtgggcagctgcaagagcgaagtggaagttgacatccattactgccaagggaagtgcgcttccaaagcaatgtactcaatcgacatcaatgacgtgcaagaccaatgctcctgctgttcgccgacacgaaccgagccgatgcaggtggctttgcactgcaccaacggcagtgttgtctaccacgaagtgctgaacgcaatggagtgcaaatgcagtcctagaaagtgtagcaaa

SEQ ID NO: 21362 - DNA, 8439 bp, synthetic construct; identical to SEQ ID NO: 21303
  misc_feature 1..8439: note = source = /note="Description of Artificial Sequence: Synthetic coding sequence"
  source 1..8439: mol_type = other DNA

SEQ ID NO: 21363 - DNA, 8439 bp, synthetic construct
  misc_feature 1..8439: note = source = /note="Description of Artificial Sequence: Synthetic coding sequence"
  source 1..8439: mol_type = other DNA
atgatccctgcgcggtttgccggagtgctgctcgcccttgctctgatactgcccggaacgctgtgcgctgagggaaccagaggtcggtcgagcaccgcccggtgttcgctttttggatcggactttgtgaacaccttcgacggctccatgtactcctttgcgggctactgttcgtacctcctggcgggcggatgccagaaacggagcttctccattattggtgattttcagaacggaaagcgcgtctctctgtcggtctaccttggagaattctttgatattcatcttttcgttaacggaactgtaactcagggagatcaaagggtgtcgatgccgtacgcatccaaaggactttacttggaaactgaggcaggctactacaagttgagcggagaagcgtacggattcgtcgctagaatcgacggctcgggaaacttccaagtgctgctgtcagatagatactttaacaagacctgtggcctgtgtggcaactttaacatatttgccgaagatgactttatgactcaagagggaaccctgacctcagatccttacgacttcgcaaacagctgggcactttcctccggggaacagtggtgcgaaagggcgtcgcccccatctagtagctgtaacatcagctccggtgaaatgcaaaaaggactgtgggagcagtgtcagctgctgaagtcgacgtcagtgtttgcacggtgtcatcctctcgtcgatcccgaaccgtttgtcgcgctgtgcgaaaagactctttgtgagtgcgccggaggactggaatgtgcttgtcctgcgctgcttgagtacgcacgcacttgtgcccaagagggaatggtgctttacggctggactgaccattccgcatgttcgcctgtgtgtccagctggaatggaataccggcaatgtgtcagcccatgcgcgaggacgtgtcagtcccttcacatcaatgagatgtgtcaagaacgctgtgtcgatggatgcagctgtcctgaaggacaactccttgacgaaggcctttgcgtggagagcacggagtgtccatgtgtgcactcagggaaacgctaccctcccggtacctcgctcagccgcgattgtaacacgtgcatttgcagaaattcccagtggatctgttcgaatgaagaatgccccggtgaatgcctggtgactggacaatcgcactttaagtcctttgataaccgctactttactttctccggtatatgccagtaccttctggcgagggattgccaagatcactcatttagcattgtgatcgaaaccgtacaatgtgcagatgatcgggacgccgtgtgcacccgttcggtgaccgtacgactccccggactccataactcgctggtcaagttgaagcatggagcaggggtggcaatggacggacaggacgtccaactcccacttcttaagggggatctgagaattcagcataccgtgaccgcatctgtcagactttcatacggagaagatctgcagatggattgggatgggagagggcggctccttgttaaactttcgcctgtgtacgcaggtaagacctgtggactttgtggcaattacaatggcaatcaaggtgacgattttctgactccttcgggtctggccgagccaagagtggaagatttcggcaatgcctggaaacttcatggagactgtcaggatcttcaaaagcaacattccgacccatgtgcactcaaccccagaatgacccgctttagcgaagaagcctgtgctgtcctgactagcccaacctttgaggcatgtcatcgggcggtgagcccactgccctacctgagaaactgtcgctacgatgtctgttcatgttcggatggccgtgaatgcctgtgtggcgcactcgcatcgtacgcagcagcatgcgccggaaggggagtgagagtggcatggcgtgagccagggcgatgcgaactcaactgtccgaaaggacaggtgtaccttcaatgtggaaccccttgtaatcttacttgtcggtcgcttagctatcctgatgaagagtgcaacgaagcctgtcttgagggatgtttctgtccacctggactttacatggacgaacgcggtgactgcgtgcctaaagcacagtgcccatgttactacgacggtgaaatcttccaacctgaagatatctttagcgatcatcatactatgtgttactgtgaagatggctttatgcattgcaccatgtcgggtgtcccaggatcgctcctgccggatgcggtcctgtcatcgcctctgtcccataggtccaagagatccctgagttgcaggccaccgatggtcaagttggtgtgtccagccgataacctgagggcagaaggacttgaatgcaccaagacgtgtcagaattacgatctggagtgcatgtcgatgggatgcgtgagcggatgcctgtgcccgcctggtatggttcgtcatgagaacaggtgtgtcgctctggaaagatgcccttgttttcaccaaggaaaggaatacgctccaggagagactgtgaagatcggctgcaatacttgtgtctgtcaagatcggaagtggaactgcaccgatcacgtgtgtgatgcaacttgttcgaccattggcatggcccattacctgacttttgatggcctgaagtacttgtttccgggtgagtgccagtatgtgcttgttcaggactactgtggatctaaccccggaacgtttcgaatcctggttggtaacaagggttgctcgcaccctagcgtgaaatgtaagaaaagagtgactatcctggtcgaaggaggagagattgaactttttgatggcgaagtaaacgtgaagcggccaatgaaggatgaaacccatttcgaagtggtggaatccgggcgttacataattctgttgcttgggaaggcactttcggtcgtctgggatcggcacctttccatttcagtggtccttaaacagacctaccaagaaaaggtgtgcgggctttgtggtaactttgatggcattcagaataacgatctgactagctcaaacctccaggtggaggaggaccctgtcgatttcggaaactcgtggaaagtgtcctcgcagtgtgcagatactcgcaaggtgccccttgactcatcccctgccacctgtcataacaacattatgaaacagaccatggtggattcgtcatgcagaatccttacttccgatgtgttccaagattgtaacaagctcgttgatcccgaaccctacttggacgtgtgtatttacgacacttgttcctgtgaatcaattggagattgtgcatgtttctgcgataccattgccgcctacgcacatgtgtgtgcacaacatgggaaagtggtaacttggcgcactgcaaccctttgtccacaatcctgtgaggaacgcaacctgagagaaaatggatacgaatgtgaatggagatacaattcgtgcgcacctgcctgtcaagtcacctgccagcaccccgagcccctggcttgcccagtccaatgtgtcgaggggtgtcatgctcattgtccccctggaaagattcttgacgaacttctccaaacctgcgtcgatcctgaggattgtcctgtgtgtgaggtggccgggagaaggtttgccagcggaaagaaagtcaccctcaacccaagcgacccggaacattgtcaaatttgccactgtgacgtggtgaatttgacgtgcgaagcatgccaagaaccaggaggacttgtggtgccacccactgacgcacctgtttctcccactaccctgtacgtggaagatatttccgaacctcccctgcatgatttctactgctcccggctcctggatcttgtgtttctgctggacggttcgtcgcgcctttcagaagcagaatttgaggtgctgaaggcctttgttgtggacatgatggaaagactgcgtatctcccaaaagtgggtgagggtggcagtggtggaataccacgacggtagccacgcctacattgggcttaaagatcgtaagcggccttcggagctgcgtcgaatcgcatcgcaggtcaaatacgcagggagccaagtggcatcgacctccgaagtcctgaaatacaccctgtttcagatattcagtaagattgaccggcccgaggcatccagaattactctgctcctcatggcatcccaagaaccgcagagaatgtcgagaaacttcgttagatacgtccagggattgaaaaagaagaaggtcattgtgatccccgtgggcattggaccacatgcaaacctgaagcaaattcgactgatcgaaaagcaagcaccagagaataaggcattcgtgctcagctcagtggacgaacttgagcagcaacgggacgagatcgtgtcctatttgtgcgacctcgcaccagaggcccctcctcctacccttcctcccgacatggcacaggtcactgtgggtccaggccttcttggtgtctccacccttggaccaaagagaaattcgatggtgctggatgtcgcatttgttctggaagggagcgacaaaatcggcgaagcggatttcaatcggagcaaggagttcatggaagaagtcattcaacgcatggatgtgggccaagattctattcatgtgacggttctgcaatactcgtacatggtgacggtggaataccccttttcagaggcacaaagcaagggtgacatactccaaagggtgcgcgagattcgctatcaaggtggaaaccgcaccaataccggtctggcactccggtacttgagcgatcactcctttctggtcagccagggagatcgggaacaggccccaaacctcgtgtatatggtgactggaaacccagcatccgatgagattaagcgcttgcctggcgatatacaagtggtgccaatcggagtcggtccaaatgcaaacgtgcaggagctggaacgcattggatggccaaacgctcctatattgatccaagatttcgaaactctgcccagagaagcacctgatctcgtgcttcagcgatgttgtagcggtgaaggcctgcagattccgactctgtcacctgcacctgattgttcacaaccactcgacgtcatactgctcctggacggcagctcgtcgtttcctgcgagctactttgacgaaatgaagagttttgcaaaggcatttatctccaaagccaatataggaccacgactcactcaggtgtcggtcctccagtacggatcaatcaccacgatcgatgtcccatggaacgtggtccctgaaaaggcgcatctgttgtccctcgtggatgtgatgcagagagagggaggtccttcgcagattggagacgcacttggattcgcggtgcggtacctgacgagcgaaatgcacggagcccgtcctggtgcgtcgaaggccgtcgtgattttggtgactgacgtgtccgtggactctgtcgatgcagccgcggatgcagcccgctctaaccgtgtcacggtgttcccaattggaattggggacaggtacgatgcggcgcaattgagaatcctggcaggaccagcaggtgatagcaacgtcgtgaaactgcaaaggatcgaggaccttccaacgatggtgaccctcggaaactcatttttgcacaaattgtgttcgggattcgtgcgcatctgtatggacgaagatggcaatgaaaagcgccccggcgatgtttggactctgcccgaccaatgtcataccgttacctgtcaacctgatggtcagaccctgctgaaaagccaccgcgtgaactgtgatcgagggttgcgcccgtcctgtcccaactcgcaatctcctgtgaaggttgaggaaacctgcggttgtaggtggacctgcccatgtgtgtgtaccggctcgtccacgaggcatattgtcacttttgacgggcagaatttcaaacttacgggatcatgttcgtacgtgctttttcagaataaagaacaagatctggaagtgatcctgcacaacggcgcatgtagcccaggtgcacgccagggttgcatgaagtcgatcgaagtgaagcactcggcactgtccgtcgaactccattcggatatggaagttaccgtgaacggaaggttggtttccgtgccttacgtgggtgggaacatggaggtcaacgtctatggagccattatgcacgaagtgagattcaatcatctgggccatatcttcacctttacgccccaaaacaatgaatttcaactgcagctgagcccaaagacttttgcctcaaagacgtacgggctttgcggtatttgcgacgagaatggagccaacgactttatgcttagggatggaactgtgacgactgattggaaaacccttgtgcaggagtggactgtccaaagaccgggtcagacttgtcaacccattctggaggagcaatgtctggtgcctgatagctcgcattgtcaggtccttctgctgccactctttgcagagtgccacaaggtcctggccccagccactttctacgccatctgccagcaagattcctgccatcaggagcaggtgtgcgaggtgatcgcgtcctacgcgcacctgtgcagaactaacggtgtgtgtgtcgattggcgcaccccagatttttgtgcgatgtcgtgtcctcctagccttgtgtacaatcattgcgaacatggttgtccccgccactgcgacgggaacgtgagctcctgcggcgaccacccgagcgaaggatgtttttgccctcccgacaaggtgatgctcgaaggatcgtgcgtgcccgaagaagcatgcactcagtgcataggcgaggacggcgtccaacaccaattcctggaggcatgggtccctgatcatcaaccctgccagatttgtacttgtctgagcggtcgaaaggtgaactgtactacccaaccttgtccaactgctaaagcccctacttgtggcttgtgtgaagtggcgagattgcggcaaaatgcagatcaatgctgtccggagtacgaatgtgtgtgtgatccagtgtcctgcgatttgcctcctgttcctcattgcgagcgaggccttcaacctactctgaccaatcctggggaatgccgtccaaatttcacctgtgcatgtaggaaagaagaatgtaagagagtgtcgcctccatcctgtcctcctcaccgccttcctacccttagaaagacgcagtgctgtgatgaatacgaatgtgcgtgcaactgtgtgaactcgaccgtgtcctgtcccctgggttacctcgcgtctacggccaccaatgattgtggctgcaccactactacttgtctgcccgataaggtctgtgtccacagaagcactatctacccagtgggtcaattttgggaagaggggtgtgatgtgtgtacctgtaccgacatggaagatgcggttatgggactccgggtggcacagtgctcgcaaaagccatgtgaagattcatgccggagcggatttacctacgtgctccatgagggagaatgctgtgggcggtgtctcccctcggcatgtgaagttgtgaccggcagccctagaggcgattcccaaagctcctggaagtctgtgggaagccaatgggcatccccagagaacccttgcctgataaacgaatgtgtgcgtgtcaaagaggaagtgtttatccagcagcgcaatgtctcgtgtccgcagctggaggtgccagtgtgcccgtcaggatttcaactttcttgcaagacctcggcatgttgtccttcctgtcgatgcgagcgaatggaagcctgtatgctgaacggaactgtgattggacccggcaaaaccgtaatgatcgatgtctgtaccacctgtcgttgtatggtgcaggtgggagtgatttccggtttcaagttggagtgtagaaagactacctgtaacccttgcccactcggatataaggaagagaacaacactggtgagtgttgcggccgttgtctccccaccgcctgtaccattcaacttcgcggaggtcaaatcatgactctgaagcgcgacgaaactcttcaggatggttgtgatacgcacttttgcaaggttaatgaacgtggagaatacttctgggaaaagagggttaccgggtgtccgccctttgatgaacacaaatgtctggccgaaggaggtaagatcatgaaaatccccggaacttgctgtgatacctgcgaagaaccagaatgtaatgacatcaccgcccggctccaatacgttaaggtgggctcgtgcaagtccgaagtggaagtggacattcattattgtcaaggcaagtgtgcctctaaagcaatgtactcgatcgacattaacgatgtgcaggaccaatgctcgtgctgttccccaacccggactgagcccatgcaggtcgccctgcattgtaccaatggttcggtcgtctaccacgaggtcctcaatgccatggagtgtaaatgttcgcctcgcaagtgttcgaag

SEQ ID NO: 21364 - DNA, 8439 bp, synthetic construct
  misc_feature 1..8439: note = source = /note="Description of Artificial Sequence: Synthetic coding sequence"
  source 1..8439: mol_type = other DNA
atgatcccagcccgattcgctggggtgctgctggccctggctttgatccttcccggtaccttgtgcgccgaggggacccgcggtcggagttccaccgcccggtgcagcttgttcgggtctgacttcgtgaataccttcgatggttcgatgtattccttcgctggctactgctcatatctgctcgctggtgggtgtcagaaacgcagcttttccatcataggtgactttcagaatgggaagcgggtgtccctgtctgtgtatctcggagagttctttgatatacatctttttgtgaacggaacggtgacacagggcgatcagcgggtatctatgccttacgcctccaaggggctgtaccttgagaccgaggccggttattacaagttatccggggaggcatacggctttgtggcgaggatcgacgggtcgggaaacttccaagtactgctgagcgatcgctacttcaataagacctgcggcctgtgcgggaacttcaatatctttgcagaggatgactttatgacacaagaagggacactgacatctgacccatacgattttgctaacagctgggcgctcagctccggcgaacagtggtgtgagagggcctcccctccttcttcctcttgtaacatttcgtctggagagatgcaaaagggactgtgggaacagtgccagctactgaagtctacttcggtgttcgcccggtgtcatcccttagttgaccccgaaccttttgtggctttgtgcgagaagaccctttgcgagtgtgctggggggctggaatgcgcctgtcccgcgttactagagtacgcccgaacctgcgcacaggaggggatggtcctctacggctggaccgaccacagtgcctgctctcctgtctgtcccgcgggcatggaatataggcagtgcgtctctccctgtgctcgtacctgtcagtccctgcacattaatgaaatgtgccaggagcggtgtgtagatggctgttcatgcccggaagggcagcttcttgatgaggggttgtgtgtggaaagcaccgagtgcccttgtgtgcattccggtaaacggtatccgccgggaacttctctatcccgggattgcaacacctgcatttgccgtaatagtcaatggatttgttccaatgaagaatgccctggcgaatgcctggttactggacagagtcacttcaagtcatttgataatcgatacttcacatttagcggcatttgccagtatctgctggctcgcgattgtcaggaccacagtttctcaatagtgatcgagacagtgcaatgcgccgatgacagagatgccgtatgcactaggtctgttaccgtgcggcttcctggactccacaactccctggtgaagttgaaacacggcgctggagttgccatggacggtcaggacgtacagctgccactgctcaaaggcgatctgagaattcaacatacagtgactgcctcagtccggttgagttacggagaagacttgcagatggattgggacggacgcggaaggctgttggtaaaattgtcgccagtgtatgccgggaagacgtgtggcctgtgcgggaattacaatggaaatcagggcgatgacttcctgacacctagcggattggcagaaccgagggtggaggatttcggaaacgcttggaaactgcatggcgattgtcaggatctgcagaagcagcacagtgacccctgcgccttaaatccccgcatgaccaggtttagtgaagaagcatgcgccgttctcactagccctacattcgaagcgtgtcaccgtgccgttagtcccctgccttatctgcggaactgtagatatgacgtctgtagctgcagtgatgggcgtgaatgcttgtgtggcgctctcgcctcgtatgccgctgcttgtgccggccggggggtcagggtagcatggagggagcctgggcgctgcgagcttaactgtcctaaaggccaagtgtacctccagtgcggcactccgtgcaatctgacttgccgaagcctatcttatccagacgaggagtgtaatgaagcgtgcctggagggatgtttttgtcctcccggactatacatggatgagagaggagattgtgtgcctaaagcgcaatgcccctgctactatgacggtgaaatttttcagccagaggatatttttagcgaccaccataccatgtgttattgtgaggacggtttcatgcactgcaccatgtcaggcgtacccggcagtctcttgcccgacgctgtgctgtcctcccccctgtcccatagatctaagagatccctgtcctgtcgtccacccatggtgaagctggtatgtccggccgacaatttgagggccgaaggtctggaatgcactaaaacctgccagaactacgacctggaatgcatgtcaatgggttgcgtgtctgggtgtttatgtccccccggcatggtaagacacgagaacagatgtgtggctctcgaacgttgtccttgtttccaccagggcaaggaatacgcccccggcgaaaccgttaagattgggtgcaacacctgcgtgtgccaggatcgcaaatggaactgtacagaccatgtttgcgacgctacttgctctaccatcggaatggcacattacctgacgtttgatggactaaaatacctgtttcctggagagtgccaatatgtgttggtccaggattattgcggcagcaacccagggactttccgaatcctcgtggggaataagggttgctcccacccttcagtgaagtgcaagaaaagagtgacgatcctggttgaaggaggagagattgagttgtttgatggggaggttaacgtgaaaaggcctatgaaagatgaaacacatttcgaggtggtagagtccggcaggtacattatcttgctgttgggaaaggcgctgtccgttgtatgggaccggcatctgtctatcagtgtggtgctgaagcagacttaccaggaaaaggtctgtgggctatgcgggaacttcgacggtatccagaataacgacctgacatcaagcaacttacaggtggaggaggaccccgtggacttcgggaattcctggaaggtctcatcgcaatgtgccgatactcggaaggtgcctctggattcctctccagccacctgccacaacaacatcatgaaacagacaatggttgacagctcgtgtcggattttaaccagcgacgtgttccaggactgtaataagctggtggaccccgagccatatctggacgtatgcatctacgacacctgcagctgtgaatcaattggcgattgcgcatgtttttgcgatactatcgccgcatatgcccatgtatgtgcacagcacggcaaggtggtaacttggcgaacggctacactgtgtccccagtcgtgcgaggagagaaacctgcgcgaaaacggatacgagtgtgaatggcgctataactcttgtgcccccgcctgccaagtgacctgccagcatcccgagcccttggcctgcccagttcaatgtgtggagggctgccatgctcattgccctcctgggaagatcctagatgagctgctgcagacatgcgtagacccagaagactgcccagtctgtgaagtagctggcaggaggttcgcctccggtaaaaaggttactcttaatccctcagatcctgaacattgccaaatctgtcactgtgacgtggtgaatctcacatgcgaggcttgccaagagccaggaggcttggtggtgccgcctaccgatgctccagtctcccctaccaccctgtatgtggaagacatcagcgagcctccactccacgacttctattgcagtcgtttgctggatcttgtcttcttgctagatgggtcctctaggttgtccgaagctgaattcgaggtactcaaggccttcgttgtcgatatgatggaacgcctcagaatatcccagaagtgggtgagagttgccgtagtcgaatatcacgacggatcccatgcctacattggcctgaaggaccggaagaggccttccgaactgcgtagaattgccagccaggtaaagtatgctggcagccaagtggcgagcacatccgaggtcctaaagtacacactgtttcaaatcttttccaagattgatcggcctgaggcctccaggataacgctcctgctcatggcatcgcaggaaccacagaggatgtctcggaacttcgtgcgctatgtgcaagggcttaagaagaagaaagtgattgtcatcccagtcggcattggcccccatgccaacctgaaacagatccgcctcattgaaaaacaggcccccgagaacaaggcttttgtgctgtcctcagtcgacgagttggagcagcaacgggatgagatcgtcagctatctctgcgacctggcacccgaagcaccacctcctacccttccccctgatatggcccaagtgacagtgggtccaggcctgctgggagtgtctacactcggacctaaacgtaattccatggtcttggacgtcgcgtttgtcttggaggggtctgacaagatcggtgaggcagatttcaatcggagtaaggagttcatggaagaagtcatccagcggatggatgtcgggcaggacagtatccatgttacggtgttgcagtacagttatatggtaacagtggaatatcctttttctgaagcccagtccaagggggacatcctgcagagggtgcgagagatcagataccagggcggtaaccgcacaaacaccgggctggccctgcggtatctgtcagatcacagttttttggtatctcaaggagacagagaacaggcccccaatctggtgtatatggtgacaggaaaccccgcctccgacgaaatcaagcgcctccctggggacattcaagtcgtgccgatcggggtgggacccaatgccaatgtgcaagaactcgagagaattggctggcccaatgccccaatcctaatccaagattttgagacattgccccgtgaggcaccggacctggtattgcaacggtgttgcagtggtgaggggctgcagatccctactctgtctcctgcgccagattgtagccagccgcttgatgtgatactgctattggacggcagcagttcctttccagccagctactttgacgagatgaaatccttcgcgaaggccttcatcagcaaggccaacatcggtccccgcctgacacaggtgtccgtcctgcagtacgggagtattactaccatcgatgtaccctggaatgtggtgcctgagaaggctcatctcttgagcctggtggatgtcatgcaaagggaggggggacctagtcagatcggggatgcgctcggattcgcggtacgttatttgacatccgaaatgcatggcgctcgccccggcgccagcaaagccgtggtgattctggtcaccgatgtcagcgtcgactccgtggacgccgctgctgatgcggctcgatcgaatcgggttaccgtgtttccgatcggcatcggagaccgctacgatgctgctcagttgaggatcctcgccgggccagcgggagacagcaatgtagtgaagctgcagcgcatcgaggatttgccgaccatggtgaccttaggcaactccttcctacacaagctgtgctccggtttcgtgcgaatttgtatggatgaagacggcaatgagaagcgcccgggcgacgtgtggaccctcccggatcagtgtcatacagtgacctgtcagcccgacggtcagacattgctgaagtcgcacagggtcaactgcgacaggggcctgagaccatcctgccccaacagccagagccctgtaaaagtcgaggagacttgtgggtgtcgatggacgtgcccctgcgtctgcactggtagtagtaccagacatatcgtcacttttgacggacagaactttaagttgacaggctcttgctcgtacgtgctgtttcaaaacaaagagcaggatctggaagttattctccacaacggagcttgcagccccggagccaggcaagggtgcatgaaatcaatcgaagtgaagcacagtgccctgtcagtggaactgcactccgatatggaagtgaccgtgaacggacggctggtatctgtgccctacgtgggcgggaatatggaggtgaatgtctatggggccatcatgcatgaggtccggttcaatcacttaggccatatctttacctttactcctcaaaataatgagtttcagctccagttgtcccctaaaacctttgccagcaagacctacgggctgtgcgggatctgcgatgaaaatggagccaatgacttcatgctgcgggatggcactgttaccaccgattggaagaccctcgtgcaggaatggacagtgcagcgcccaggccagacttgccaaccaatccttgaagaacaatgtctggtacccgactccagtcactgccaagtgctcttactgccactgttcgcagagtgtcacaaggttttggcacctgcgacattctatgctatatgccaacaggacagctgtcaccaggaacaggtttgtgaggtgattgcaagctacgcgcatttgtgcaggaccaatggagtgtgtgtcgattggcgtactccagacttttgtgcgatgagctgccccccttccctcgtgtacaaccactgcgagcacgggtgcccccgccactgtgacgggaatgtaagtagctgcggcgatcatccatctgagggttgtttttgccctcccgataaggtaatgctcgaagggagctgtgtccctgaggaggcgtgcactcagtgcataggagaagatggagtgcagcatcagttcttggaggcatgggtgccagatcaccagccatgtcagatttgcacatgtctctccggtagaaaggtgaattgcaccactcagccatgtcccaccgccaaagcgcctacttgtggtctctgtgaggtggcccgcctcaggcaaaatgccgaccagtgctgtcctgagtatgagtgtgtgtgtgatcctgtttcgtgtgacctgccgcccgtccctcattgcgaaagagggctgcaacctacactgacaaacccaggggagtgcagacctaattttacctgcgcgtgccgcaaagaagaatgtaagcgtgtatctcctccctcttgccccccgcaccggttacctacactaaggaaaacacaatgctgcgacgagtatgagtgtgcatgtaattgcgttaattcaaccgtgtcctgcccgctggggtatcttgccagcactgcgacaaacgactgcggatgcacgactactacatgcctgcccgacaaggtctgtgtgcaccgctctaccatctaccctgtcgggcaattctgggaggagggctgcgacgtctgcacatgtacggacatggaagacgccgttatgggcctgcgggtcgctcagtgctcccaaaagccctgtgaggattcctgcaggtcaggatttacttacgtcctccacgaaggggagtgttgtggacggtgtctgcctagtgcttgcgaggtggtgacaggtagtccgcgcggcgatagccagagctcttggaagagtgttggaagccagtgggcgtcacctgagaatccatgcctgataaacgaatgtgtgcgcgtgaaggaggaggtgttcatccaacaaaggaatgtcagctgcccccaactggaggtgccagtctgtccctctggttttcagctcagctgcaagacatctgcttgttgtccttcctgccggtgtgagcgcatggaggcatgcatgctgaatggcaccgtgatcggacccggcaagactgtgatgatagacgtgtgcactacttgtcggtgcatggtgcaggttggagtgatcagtgggttcaagctggaatgtaggaagacaacatgtaatccttgccctctgggatacaaggaggagaacaatacaggcgaatgttgtgggaggtgccttcccactgcttgcacgatccagcttaggggtggacagataatgacccttaaacgggacgagacgttacaggacggttgcgatacccacttttgtaaggtaaacgaaaggggcgaatacttctgggaaaagagggtgaccggatgcccacctttcgatgagcataagtgcctcgccgaggggggcaaaattatgaagattccggggacttgctgcgacacatgtgaggaaccggagtgcaacgacataactgctcgacttcagtacgtgaaggtgggatcttgtaaaagcgaagttgaagtcgacatccattattgtcagggaaagtgcgctagtaaggccatgtactccattgacatcaacgacgttcaggaccaatgctcatgctgctcacctacacgtactgagccaatgcaggtcgcactacactgtactaacggatcagtggtctaccatgaggtgctcaacgctatggagtgcaagtgtagcccccgcaagtgcagtaag

SEQ ID NO: 21365 - DNA, 8439 bp, synthetic construct
  misc_feature 1..8439: note = source = /note="Description of Artificial Sequence: Synthetic coding sequence"
  source 1..8439: mol_type = other DNA
atgattcccgcgcggtttgccggagtattgctggccctggcactgatccttcccggaacactgtgtgctgaaggcaccagggggcggagctccacggcccggtgcagcctgttcggcagcgatttcgtaaataccttcgatggaagtatgtatagctttgcgggttactgttcatacctgctggctgggggctgtcagaagagaagctttagcatcatcggagatttccagaacggaaaacgagtgagtctttccgtgtacctgggcgagttcttcgacatccatctctttgtgaacgggacagtgactcagggcgatcagcgagtttcaatgccttacgcctcaaagggcctctatcttgagacagaagcgggctactataaactcagtggcgaagcatacggctttgtggcccgcatcgatggatcagggaatttccaggtgctgcttagtgaccgctatttcaataaaacctgcggactgtgcggcaatttcaatatcttcgcagaggatgatttcatgacccaggaaggtacgctcacttctgatccctacgactttgctaactcatgggcactgtcctctggcgagcagtggtgtgagagggcatcacccccctcttcctcatgcaacattagtagcggcgagatgcaaaaggggctctgggagcagtgtcaactgctgaaatctacctcagtatttgcaaggtgtcaccccctggtggatccggagccttttgtcgccttgtgtgagaagaccctctgtgagtgcgccggggggctcgaatgtgcctgtcccgccttgctcgagtacgccaggacatgcgcccaggagggtatggttctctacggctggaccgatcactccgcttgttctccggtgtgcccagctgggatggagtaccgacagtgtgtttcaccatgtgctagaacctgccagtccctgcacattaacgagatgtgccaggaaaggtgcgtcgatggatgtagttgccctgaggggcagcttcttgacgagggcctctgtgttgagtctacagagtgcccgtgcgtccattctggcaagagatatccaccaggtacaagcctcagcagagattgtaatacatgtatttgccgcaacagtcagtggatttgctctaatgaggagtgtccgggggagtgccttgtcaccggtcagtctcacttcaaatcatttgacaacagatatttcacatttagtggcatttgccagtaccttctggctagggactgtcaggatcacagcttcagcattgttattgagacagtacagtgcgcagatgacagggatgcagtgtgcacaagatcagtgacggtaagactgcctgggttgcataacagcctggtcaagctgaaacatggtgctggcgtagccatggacggtcaagatgtgcaacttcctctcttgaaaggcgacctccgaatacagcacaccgtgacggcctccgtgaggcttagttacggggaggaccttcagatggattgggacggtagaggcagacttctggtcaagctgtcccccgtgtatgctggcaagacatgtgggctttgtgggaattataacgggaaccagggagacgatttcttgacaccctccgggcttgcagaacctcgagtcgaggacttcggaaatgcttggaaattgcatggtgactgccaggacctgcagaagcaacactcagacccctgtgcactcaatcctcggatgacaagattcagtgaggaagcgtgtgccgtgctgacttcccccacttttgaggcctgtcaccgcgcagtgagccctctgccctacctgaggaattgcaggtacgatgtctgttcctgttcagacggccgggagtgtctttgtggagccctcgccagttacgcggccgcctgtgctggcagaggcgtgagggttgcctggcgcgaacccggtcgctgcgagctcaattgtcctaaaggccaagtgtacctgcagtgcggaacgccctgcaatcttacctgtcgctctctgtcttatccagatgaggaatgcaacgaagcctgcctggaaggttgcttctgtccgcccggtctgtacatggacgaacggggggactgcgtgccaaaggcccagtgtccttgctactatgacggcgagatcttccaaccagaggatatcttcagcgatcatcacaccatgtgctattgcgaagatggtttcatgcactgtaccatgtctggcgttccaggcagcctgctgccagatgccgtgctcagttctcctttgagtcatcgatccaagcgctcactgagctgccggccacctatggtaaaattggtgtgccccgccgataatctgagggctgagggcttggagtgcacaaagacttgccagaattatgatcttgaatgtatgtccatgggttgcgtctcaggatgcttgtgccctcccggcatggtgagacatgagaataggtgcgtggctctcgagcggtgcccttgtttccaccaggggaaagagtacgcccccggcgagactgtgaaaatcggatgtaacacgtgcgtatgccaggatcgcaagtggaactgcactgaccacgtttgtgacgctacttgtagcacgattgggatggcccactacctcacgttcgacggactgaagtatctcttccctggggagtgtcagtatgtgctggtccaggattactgcggctcaaaccccggcactttccgaattcttgtagggaacaaaggctgttcccaccctagcgtgaagtgcaagaagagagtaactattctggtcgaagggggagagatagagctttttgatggcgaggtcaatgtgaaacgacccatgaaggatgagactcacttcgaggtggtagagtccggacgctacatcatccttttgcttggtaaggccttgtctgtggtgtgggacagacacctctccatatctgtggtgctgaagcagacctatcaggagaaggtgtgtgggctgtgcggtaatttcgatggaatccagaacaacgacctcacatcaagcaacctccaggtcgaggaagaccctgtggacttcggcaactcttggaaggttagctcacaatgcgctgatacacgcaaagtcccactggatagcagcccggctacgtgtcacaataatataatgaaacagacaatggtggactctagttgtagaatcctgacatcagatgtattccaagattgtaacaagctcgttgatccggaaccatacttggacgtgtgcatctacgatacatgcagctgcgagtccataggggattgtgcatgtttttgtgatacgatcgccgcttatgcccatgtctgtgcgcagcacgggaaagtcgtcacttggagaaccgccactctgtgcccacaaagctgcgaagaacgcaaccttagggaaaacggatacgaatgcgaatggcgatacaacagttgtgccccagcgtgtcaggtgacttgtcaacatcccgaacctctcgcatgcccagtccagtgcgttgaaggctgccacgctcattgtccgcccggcaagatactcgatgagcttttgcagacgtgcgtggacccagaggattgcccagtatgcgaggtggccggcagacgcttcgcctcaggtaagaaggttaccttgaatcctagtgatcctgagcactgtcagatctgtcactgtgatgtcgtgaatctcacatgcgaggcctgtcaagagcccggcggcttggtggtgcccccgacagatgcccctgtgtcaccaacgaccttgtacgttgaggacatctctgaaccacctcttcacgacttttactgctcccgactgctggatcttgtgtttctgcttgacgggtcctcccgactgtccgaggcagagtttgaggtcctgaaagcattcgtcgtcgacatgatggagagactcaggatctctcagaagtgggtgagagtggctgtggtggaatatcacgacggatcacatgcctacatcgggcttaaggataggaagagaccatccgaacttaggcgaattgctagtcaggtcaaatacgcagggagccaggtcgcgagcactagtgaagtgttgaagtacacattgttccagatattctccaagatcgatcgcccagaagcatccaggataacccttctgcttatggcgagccaggagccccaaaggatgagcagaaattttgtgcggtacgtacagggtcttaagaagaagaaggtaatagtcatccccgtcggtatcggcccacacgcaaaccttaagcaaattcgcctgatcgaaaagcaagcacctgagaacaaggcctttgtgctgagctctgtcgacgaactggagcagcaaagggatgagatagtcagctacctgtgcgacctggctccggaggccccaccacccaccttgcccccagatatggcccaggtgacagtcggccccggactgctgggtgtcagtacactgggcccaaagcgcaattcaatggtcctggatgtagccttcgtcctcgagggaagcgacaagatcggagaagcggactttaaccggtctaaggaatttatggaggaggtaatccagagaatggacgtcgggcaggattcaatccacgtaactgtgctgcagtacagttatatggtaacagtagagtatcccttcagcgaagcgcagtccaaaggggacattttgcaacgggttcgcgagatcaggtaccagggcgggaataggacaaacaccggactggcccttcgctatctgtctgaccactcctttctggtgagccagggagaccgggaacaggcccctaatctggtgtatatggtgacaggaaacccggcctcagatgagattaaaaggctgcctggggatatacaggtggtgccaattggggtggggcccaacgccaatgtgcaggagctcgaacgcatcgggtggccaaacgcccccatactgattcaagactttgaaacactgcctcgagaagcccctgacttggtcctgcagcgctgctgttccggggaaggtttgcagatccccaccctgagccctgcaccggattgcagccagccactggacgttatcctgttgcttgatggtagctcatcatttcccgcctcttacttcgacgaaatgaagtcttttgccaaagcgtttatttcaaaggcaaatattggccccagactcacccaggtgagtgtccttcaatacggcagcattactaccatcgacgtgccttggaatgttgtgccagaaaaagcacatctgcttagtcttgttgacgtgatgcagcgcgaaggtggtccctctcaaattggcgatgccctcgggttcgcggttagatatctgacctccgagatgcacggtgcccggcccggcgcctctaaggcagttgtgatactggtgacggatgtatcagttgacagcgtggacgcggccgcggacgcagccaggagtaatagggtaaccgtttttccaatcgggattggcgacaggtatgatgccgcacagctgaggatactggccgggcccgccggagatagcaacgtcgtcaagctgcaaagaatcgaggaccttccaactatggttacactcggcaacagcttcctgcataagctctgtagtggattcgttcgcatttgcatggacgaggatggaaacgagaagagacccggtgacgtgtggacactccccgatcagtgccacacagtcacctgccagccagacggccagaccctgttgaagtcccaccgagttaactgcgatcgagggctgcggcctagctgtcctaactctcaatcaccggtgaaagtggaggagacttgtggatgtaggtggacttgcccatgcgtgtgcactggctccagcacacgccatatcgtgacattcgacggccagaactttaagctgaccgggagctgttcctacgtgttgttccaaaacaaggaacaggacctggaggtgattctccacaacggcgcttgttccccaggagcccgacagggatgtatgaaatctattgaggtgaagcattctgccctgtctgtggagctgcattctgacatggaggtcacggtgaatgggagactggtgagcgtgccttacgtcggagggaatatggaagtaaacgtgtacggcgccattatgcacgaggtcaggttcaaccacttggggcacattttcaccttcaccccacagaacaatgagttccaactgcagctctctcctaaaaccttcgcctctaaaacgtatggcttgtgtgggatctgtgatgaaaacggcgctaacgatttcatgttgagggatggaacagtcactaccgactggaaaactctggtccaagagtggaccgtgcaaaggcccggccaaacctgccaacctatcctggaggaacagtgtttggtgcccgactcatcacactgccaggtgttgctgctgcctctgttcgctgaatgtcacaaggttctggctccagccactttttacgccatttgccagcaggatagctgccaccaggaacaggtatgtgaggtcattgccagctatgcccacttgtgccgcaccaacggagtgtgtgtggactggcgcacacccgacttttgtgccatgagctgcccaccttctctggtgtataaccactgtgagcacggctgtccaaggcactgcgacgggaacgtgtcaagttgtggtgaccacccttccgaggggtgcttctgccccccagataaggtgatgctcgagggcagttgtgtgccagaggaggcctgcacgcagtgcatcggagaagacggcgttcagcatcagtttcttgaagcatgggtacctgaccatcagccttgtcagatttgcacgtgtctgtccggaaggaaagttaattgcacaactcagccatgtcccacagccaaggcccctacttgtggcctttgtgaagttgcccggctgagacagaacgcagaccagtgctgtccggagtatgagtgtgtttgtgacccagtctcctgtgatctcccaccggttccccattgtgagagagggttgcagccaaccctgactaatccaggagagtgtaggcctaactttacttgcgcatgccgcaaagaggagtgtaaaagagtaagcccgccatcctgtccccctcaccggttgcctacactgcgcaagacgcaatgttgtgacgagtacgaatgtgcttgcaattgcgtaaacagcacagttagctgccctctggggtatctggcttccactgccacaaacgactgcgggtgcacaactacaacctgtttgcctgacaaggtgtgtgtacaccggtctacgatttaccctgttgggcagttctgggaggaaggatgcgatgtctgtacatgtaccgatatggaggacgcagttatggggctgcgggtggcacagtgttctcagaagccatgcgaagattcatgtcggagtggattcacatacgtcctgcacgagggagagtgttgcggccgctgcctccccagtgcttgtgaagtcgtgaccggaagcccccggggcgatagtcaatcttcttggaaaagtgtcggcagccagtgggcctcccctgagaatccttgtctcattaacgagtgcgtgagagtgaaagaggaagtctttattcagcaaagaaacgtgtcctgtccacagctggaagttccagtctgcccttccggcttccagctgagctgcaagacgagtgcctgttgcccttcctgcagatgtgaaagaatggaggcttgtatgctgaatggcacagtcattggacccggaaagacagtgatgatcgacgtgtgtacaacctgcagatgtatggtacaggtcggggtgattagtgggtttaagctcgaatgccgaaagacaacatgtaacccatgtcccctgggatacaaagaggagaataacaccggcgaatgttgcggtcggtgcctcccaacggcctgtaccatccagcttcgcggcggacaaatcatgacgctgaagcgcgacgaaactttgcaggacggctgcgacactcacttctgtaaagtaaacgagcgaggggaatatttctgggaaaagcgggtgactggttgtccccccttcgacgaacataaatgcctggcagagggaggaaagataatgaagattcccggcacatgctgcgacacatgtgaggagccagaatgtaatgacattaccgctcgactgcagtatgttaaggtgggttcttgtaagtcagaggtggaggtcgatatccattactgtcaaggtaaatgtgcgtctaaggctatgtactccatcgacataaacgacgttcaggaccagtgttcctgttgttcaccgacacgaacagagccaatgcaggtggcactccactgcaccaatggatctgtggtctatcatgaggtactgaatgcaatggagtgtaagtgctccccccgcaaatgcagtaaa

SEQ ID NO: 21366 - DNA, 8439 bp, synthetic construct
  misc_feature 1..8439: note = source = /note="Description of Artificial Sequence: Synthetic coding sequence"
  source 1..8439: mol_type = other DNA
atgataccagctaggtttgccggtgttctcctggctcttgccctgatccttcctggaactctttgtgcggaaggcactcgaggccgttcatcgactgcacgctgttccctctttggctccgactttgtgaacactttcgatgggtcaatgtactcgtttgcgggatactgttcatacctccttgccgggggttgtcaaaagcgttcgttttcgattattggagacttccaaaacggaaaaagagtgtcactctcagtgtacctcggcgagttctttgacatccatctcttcgtgaatggcactgtcacccagggtgaccagcgtgtttcgatgccctatgcgtcgaagggtctttacctggaaaccgaggcaggatactacaagctgtcgggcgaggcgtacgggtttgtggccaggatcgatggatcaggtaatttccaagtgctgctgtcagacagatacttcaataagacttgcgggctttgcggaaactttaacatattcgctgaggatgatttcatgactcaagagggaaccctgacctccgacccctacgactttgccaactcatgggccctgtcctccggtgagcagtggtgcgaaagggccagccccccttcatcctcgtgtaacatttcgtccggggaaatgcagaaaggcctgtgggaacagtgccaactgcttaagagcacctccgttttcgcccgctgccacccactcgtcgatccagaaccgtttgtggcactgtgcgagaaaaccctttgtgagtgcgcgggcggactggagtgtgcctgtccggcgttgctggaatacgcccgcacgtgcgcccaagaaggcatggtgttgtacggatggactgatcactcagcatgctctccggtgtgtcctgcgggcatggaataccgtcagtgcgtgagtccatgtgcccgcacctgtcagtcgttgcacatcaatgaaatgtgtcaggagaggtgcgtcgatggttgctcctgcccagaaggccaactgctggatgaaggactctgcgtggaatcaaccgaatgcccctgcgtgcatagcggtaagcggtatccgcctggcaccagccttagccgcgattgcaacacttgtatctgccgaaactcccagtggatctgttcaaacgaagagtgtccaggtgaatgtcttgtcacgggtcaatcccactttaagagcttcgataaccgctactttacctttagcggtatctgtcagtacctgctcgcacgggattgtcaggatcattcgttttctatcgtgatcgaaactgtgcaatgtgccgacgatagagacgcagtgtgtactaggtcagtcacggtgcgcctgcctggactgcacaatagccttgtgaaacttaaacacggcgcgggagtggcaatggacggacaagatgtgcagctgccacttctgaagggagatctgcggatccaacatactgtcaccgcgtcagtgagactgtcgtacggcgaagatcttcagatggactgggatggtagaggacggcttttggtcaagctctccccagtctacgcaggcaaaacttgtggactttgcggcaactataacggaaaccagggtgacgattttctcaccccctcaggtcttgcagaacctagagtggaggactttgggaacgcatggaagttgcatggtgattgccaggatttgcagaagcagcattcggatccttgtgcactcaaccctcgcatgactagatttagcgaagaagcgtgtgcagtcctgactagcccgaccttcgaggcatgtcacagggcggtgtccccactgccttaccttcgaaattgccgatacgacgtgtgttcctgttccgacggtagagaatgcctgtgtggcgcactggcttcctacgcagccgcctgtgctggacggggcgtgcgggtggcctggcgtgaacctggacggtgtgaacttaattgtcccaaagggcaagtctacctgcaatgcggtactccctgtaacctgacgtgtagatcgttgtcgtaccctgatgaagaatgtaacgaggcctgtcttgaaggttgcttctgccctcctggactgtacatggacgaacggggtgactgtgtcccaaaggcacagtgtccatgttactacgatggagaaatctttcaacccgaggacattttcagtgatcatcacaccatgtgttactgcgaggatggattcatgcactgtaccatgtcgggtgtcccaggatccctcctgcctgatgccgtgctttcaagccctctgtcccatcggagcaagagatccctgagctgtagaccccctatggtgaaactggtgtgtccagcagataatctcagagcggaaggtttggaatgtaccaaaacttgtcaaaactacgatctggagtgcatgtcgatgggctgtgtctcaggatgtctgtgcccgccgggtatggtgcggcacgaaaataggtgcgtggcacttgaacggtgtccatgcttccaccaaggtaaagaatacgcacctggtgaaactgtgaaaattggatgtaacacctgcgtgtgtcaggaccgcaaatggaactgtaccgaccatgtctgtgacgccacctgctccactattggcatggcccactaccttacttttgatggcctcaagtacctgttcccgggtgaatgtcaatacgtcctggtccaagattactgcgggtcgaatcctggaaccttcagaattctcgtgggaaacaaaggttgctcgcatccttccgtgaaatgcaaaaaacgtgtgaccattctcgtggaaggaggggaaatcgaactttttgacggagaagtcaacgtgaagcgcccaatgaaagatgaaacgcatttcgaagtcgtggaaagcggtagatacatcatcctcctgctgggaaaggccctgtccgtcgtgtgggatagacatctgtcgataagcgtcgtcttgaaacagacctatcaagaaaaggtgtgcggcctgtgtggaaactttgacggtattcaaaacaacgacctgacctcgtccaatctccaagtggaggaggaccctgtggacttcgggaacagctggaaagtgagcagccaatgtgcagatactaggaaggtacctcttgactcctcaccggccacttgtcacaacaatatcatgaaacaaaccatggtggattcgtcctgtcgaatccttacgtccgacgtgtttcaagattgtaataagctggttgatccagaaccataccttgacgtgtgtatctacgacacctgttcatgtgaatccattggagactgcgcatgtttttgtgacaccattgcagcttacgcacatgtgtgcgcacagcacggtaaggtcgttacctggcggaccgcgactctttgtccccagtcatgtgaggaacggaatttgagggaaaatgggtacgaatgcgagtggaggtataactcatgtgcccctgcatgccaagtcacgtgtcaacatcctgagcccctcgcgtgtccagtgcaatgtgtcgaaggttgtcatgcacattgtcctccaggcaaaattcttgacgagctccttcagacttgcgtggatccagaggattgcccggtgtgtgaagtggccggtaggagatttgcatccgggaagaaagtgactctgaatccaagcgatcctgagcattgtcaaatttgtcattgtgatgtcgtgaatctgacttgtgaggcttgtcaggaacctggaggtttggtggtgcctcctaccgacgctcctgtctcgccaactactctttacgtggaggacatttccgaacctcccctgcatgatttctattgtagccgtctgcttgaccttgtgtttctccttgatggttcttcgcggctttcggaagctgaatttgaagtgttgaaggcatttgtcgtcgatatgatggaaaggcttcgtatatcgcaaaagtgggtgcgggtagccgtcgtggaataccacgatggatcccatgcttacattggacttaaggaccgaaagcgaccaagcgaactccgacgaattgcatcacaagtgaagtacgcaggttcccaggtggcatctacttctgaagtgctcaaatacactctcttccagattttctcaaagatcgaccgccccgaggcctcgaggattaccttgctcctgatggctagccaggagcctcagcgcatgtccaggaactttgtcagatatgtgcagggactcaagaaaaagaaagtgattgtgattcctgtgggtattggaccccatgcaaacttgaaacagattaggttgatcgagaagcaggccccagaaaacaaggcgtttgtgctgtcgagcgtggatgaactcgagcaacagagggacgaaattgtgtcatacctgtgcgatttggctcccgaggccccaccacctacgctcccacctgatatggcccaagtcaccgtgggccctggtttgctgggagtgtcaaccctgggacccaagagaaatagcatggttcttgatgtcgcatttgttcttgaaggctcggataagattggcgaagcagatttcaacagaagcaaggagtttatggaagaagttatacaacggatggatgtgggacaggattcgatccacgtgactgtgttgcagtactcatacatggtcactgtggaataccctttctcggaggcccaaagcaaaggagacatcttgcaacgcgtgagagaaatccgataccagggaggcaacaggactaatactggactcgctctgcgctatctgtcggatcacagcttcctggtgagccaaggtgatcgggaacaagcaccaaatcttgtgtacatggtgacgggtaaccctgcatctgatgagataaagagactgcctggtgatattcaggtggtgcctattggagtgggtcccaatgcaaacgtgcaagagctggagcgcatcggctggccaaacgccccaatcctgattcaggactttgaaactctcccccgagaggcacctgatctggtgcttcagagatgctgttcgggagagggccttcagattccaactctcagccccgcccccgattgttcacaaccattggatgtgattctgctcctggatggatcatcgtcgtttccagcatcatacttcgacgagatgaaatcatttgccaaagcctttatctccaaggcaaacataggtcctcgccttacccaggtgtcggtgcttcagtatggatcgatcaccaccattgatgtgccatggaacgtcgtgcctgaaaaagctcatcttctgtcgctggtcgatgtgatgcaaagagagggcggaccttcacaaattggagatgcacttggattcgcagtgcggtacctgacgtcggagatgcatggtgcacggccaggggcctccaaggcagtcgtgatcctcgtgaccgatgtctccgtggatagtgtcgacgccgccgcagacgcagctcgctcgaatcgagtgaccgtgttcccaattggaatcggagatcgatacgatgcggcacaactccggatactcgctggacctgcgggagatagcaacgtagtgaagctgcagaggatagaagatcttcctaccatggtgacccttggaaactcctttctgcataagctctgcagcggatttgtgaggatctgtatggatgaagatggcaatgaaaagcgcccaggagatgtttggaccctccccgatcagtgccatactgtcacttgtcaacctgatggacagaccctgctgaaatcccatcgtgtgaactgtgatcggggcctccgacccagctgtcccaattcgcaatcaccggtgaaagtggaggagacttgtggatgtagatggacttgcccgtgcgtgtgcactggctcgtcaacccgtcacatcgtgacttttgacggacaaaactttaagctcactggctcgtgttcctacgtgctctttcagaataaggagcaagacctggaagtgattttgcataacggagcatgttcaccgggcgcgagacaaggttgcatgaagtcgattgaggtgaaacattcagccctgtcggtcgagctccactcagacatggaggtgactgtgaatgggagactggtgtccgtgccgtacgttggaggaaatatggaagtgaacgtgtacggagcaattatgcatgaagtgcggttcaaccacctgggccacattttcacctttaccccccaaaacaacgaatttcagctccagctttcgccaaagacctttgcatcgaaaacttacggactgtgtggtatttgcgatgaaaatggcgcgaacgatttcatgcttcgagatgggactgtcaccaccgattggaaaacgctggtccaagaatggaccgtgcaaaggcccggacagacttgtcagcctattcttgaagagcagtgtcttgtcccagattccagccattgtcaggtgcttcttcttccattgtttgcagaatgccataaggtgcttgcaccagccactttttacgcaatctgccagcaggactcctgtcatcaggaacaagtgtgtgaggtcatcgcttcctatgcacatctttgcagaactaacggagtgtgtgtggattggagaactcctgatttttgtgccatgtcctgcccaccatcacttgtgtacaaccattgtgaacatgggtgtcctcggcactgtgatggcaatgtatcgtcctgtggcgaccacccaagcgaggggtgcttttgccccccagacaaagttatgcttgagggatcttgtgtgccagaggaagcatgtacgcaatgtatcggagaagatggtgtgcagcatcagtttcttgaagcatgggtgccagaccatcaaccctgccaaatttgtacctgcctttcaggtcgaaaggtgaactgtacgactcagccttgtccgaccgcgaaggcccccacttgtggactgtgcgaagtggcccggcttagacagaacgcggaccaatgttgccctgagtacgaatgcgtctgcgaccccgtgtcatgtgacctgccacctgtcccgcattgtgaacgtggtttgcagcctactctgaccaaccctggtgagtgcagacccaatttcacctgtgcatgtcgtaaagaagagtgtaagcgggtgagccctccttcatgtcctccacaccgcctccccaccctcagaaagacccagtgttgcgacgaatacgaatgtgcatgtaattgtgtcaactcgaccgtcagctgcccattggggtacctggcatcgactgcgaccaacgattgcggatgtaccaccaccacttgtctgcctgacaaagtgtgtgttcaccgttcaactatttaccctgtgggacaattttgggaggaagggtgcgatgtctgcacctgtactgacatggaagatgccgtgatgggactccgtgtcgctcagtgtagccaaaaaccatgcgaagattcctgcagatccggattcacttacgtgctgcatgagggggaatgttgtggtcgatgtctcccatccgcatgtgaggtggtgaccggaagcccacgcggagactcacaatcatcgtggaaatcggtcggtagccagtgggcgtcaccagaaaacccttgcctgattaacgaatgcgtccgagtgaaggaggaagtgtttattcaacaaaggaatgtgtcgtgccctcagctcgaagtgccagtctgtcctagcggttttcagctgtcgtgcaaaacttccgcatgctgcccaagctgccggtgtgaacggatggaggcctgcatgctgaatggaaccgtgattggaccaggtaagaccgtcatgattgacgtttgtactacgtgccgctgcatggtgcaagtcggtgtgattagcggtttcaaacttgaatgtcgtaagaccacctgtaacccatgtccgttgggatacaaggaggaaaacaacacgggagagtgctgcggaagatgcttgccaaccgcatgcactatccagctgcgtggcggacaaatcatgaccctcaaaagagacgagactctgcaagacggatgtgacactcacttttgcaaagtgaatgaaagaggagagtatttctgggaaaagcgcgtgactggttgtccgccttttgacgaacacaagtgtttggcagagggcggcaagatcatgaaaatccctgggacttgttgtgacacttgcgaagaacccgaatgtaatgacattactgcacgccttcagtacgtgaaggtcggatcctgtaaatcagaggtcgaggtcgatattcattactgccaaggcaaatgcgcatcaaaggcaatgtactcgattgacattaatgatgtgcaggatcaatgttcgtgttgtagccccaccaggacggaaccaatgcaagtggctcttcactgtaccaatgggagcgtcgtctaccatgaagtccttaacgcaatggagtgtaagtgtagcccaagaaagtgtagcaaa

SEQ ID NO: 21367 - DNA, 8439 bp, synthetic construct
  misc_feature 1..8439: note = source = /note="Description of Artificial Sequence: Synthetic coding sequence"
  source 1..8439: mol_type = other DNA
atgatcccggccagatttgcaggagtgcttctggccctggccctgattttgcccgggaccctgtgcgctgaggggacccgaggacgctcgtccactgcccggtgctcgctgttcgggtcggacttcgtcaataccttcgatggatccatgtactcgtttgcgggatactgctcctaccttctggcaggcggctgccaaaagcgcagcttctcgatcattggagatttccagaacggcaagcgggtgtcactgagcgtctacctcggggagttctttgatatccacctctttgtcaatggaacggtcacccagggcgaccaacgagtctcgatgccgtacgcttcaaagggcctgtacttggaaaccgaagctggttattacaagttgtcgggggaagcatacggattcgtggcgcgcatcgacggcagcggcaactttcaagtgctcctctcggacagatatttcaacaagacctgcggactgtgtgggaactttaacatctttgcggaggacgactttatgacccaggaaggtaccctgactagcgacccgtatgatttcgcaaatagctgggcgctctcttccggcgaacagtggtgtgaacgcgcctccccaccttcatcgagctgcaatatcagctcgggagagatgcagaagggactgtgggaacagtgccaactgctcaaatctacctcggtgttcgctcgctgccacccactcgtggatccggagccgttcgtcgcactctgtgaaaagaccttgtgcgaatgcgcaggcggactggagtgcgcctgcccagccctgctcgaatacgctcggacctgcgcccaagagggcatggtgctctacggttggactgatcattccgcttgttcaccggtgtgcccggcgggtatggaataccggcaatgcgtttcgccctgcgcgcggacgtgccagagcctgcacataaacgaaatgtgccaggagcgctgcgtcgacggctgttcgtgcccggaaggacagctgctggacgaaggactgtgcgtcgagtccaccgagtgcccgtgtgtacattcaggaaagaggtacccgccgggaacctctctgtccagagattgcaatacctgcatctgtagaaactcccagtggatctgctcaaatgaggagtgccccggtgagtgcctggtgaccggacaaagccactttaagtcgttcgataatagatatttcactttctccggaatctgccagtacctgctggcccgcgactgtcaagaccattccttctcaattgtgatcgaaaccgtgcaatgtgcagacgacagggatgcggtgtgcactcggtcggtcactgtgcggctcccgggcctgcataattcgctggtgaagctgaagcacggcgccggagtggcgatggacggacaggatgtgcagctgccgcttctgaaaggagatctgcggatccaacacaccgtgaccgcaagcgtacgtctctcctacggagaggacttgcagatggattgggacggcagaggaaggctcctggtgaagctctcgccggtctacgccggaaaaacgtgcgggttgtgcggcaactataatgggaaccagggcgacgactttctgaccccatcaggcctggcggagccgcgggtggaggacttcggtaacgcctggaaactgcacggagactgccaggacctccagaagcagcactccgacccgtgcgcgctgaatccacgcatgacgagattctcggaggaggcctgtgcagtccttacctcccctaccttcgaggcttgtcaccgcgctgtttccccgctgccataccttcggaactgccggtacgacgtgtgctcatgttccgatggccgcgaatgcctgtgcggcgctttggcctcctatgctgctgcgtgcgccggccgcggagtgagagttgcgtggcgcgagccaggccgctgcgaacttaattgcccgaaaggacaagtgtacctgcagtgcggaaccccttgtaacctgacctgccgctcattgtcataccccgatgaagaatgcaacgaggcatgcctggaaggttgtttctgccccccggggttgtacatggacgaaagaggagattgcgtccccaaggcccagtgcccatgctactacgacggcgaaatcttccagccagaggacatcttttcagatcatcacactatgtgctactgcgaggacggattcatgcactgtactatgtcgggagtcccgggatcactcctgcccgacgccgtgctgtcgtcaccgctgtcgcataggagcaaacgctccttgtcatgccgcccgccgatggtcaaacttgtgtgtccggcggataacctgagggccgagggccttgaatgcacgaaaacgtgtcagaactacgacttggaatgcatgtccatggggtgtgtgtcaggatgcttgtgcccacctggaatggtccgccatgaaaaccgctgtgtcgctctggagcggtgcccatgcttccaccagggaaaggagtacgcaccgggcgaaaccgtgaagatcggttgcaacacttgtgtctgccaggatagaaagtggaactgtaccgaccacgtgtgcgatgccacctgctcgaccatcgggatggctcattacctgacttttgacgggctgaagtacctgtttccgggggaatgtcagtacgtcctggtgcaggactactgcggatcgaatccaggtacttttagaatcctggtggggaataagggctgctcccatccgagcgtgaagtgcaagaagcgggtcactatcctcgtggaaggcggagagatcgaactcttcgacggtgaagtgaacgtgaaaagaccgatgaaggatgaaacccactttgaggttgtggagtcgggccgctacatcatcctcctgctgggtaaagcactgagcgtggtgtgggaccgacacctgtcgatcagcgtcgtgctcaagcagacttaccaggaaaaggtttgcggattgtgtggaaatttcgacggaattcagaataacgacttgacgagctccaacctccaggtggaggaagatcctgtggacttcgggaattcctggaaagtgtccagccaatgtgccgatacgcgcaaggtgcccctcgactccagtccggcgacctgccataacaacatcatgaagcaaacgatggtggactcgtcgtgcagaatcctgacgtctgacgtgttccaggattgtaacaaactcgttgaccctgagccgtacctggacgtgtgcatctacgacacctgcagctgtgagtcgatcggtgactgcgcgtgcttttgcgacaccatcgcggcctacgcccatgtgtgcgcccagcatggaaaggtggtgacttggcgcaccgcaaccctgtgtccacaatcgtgcgaagagcggaacctgagggagaacggatacgagtgcgagtggaggtacaactcctgcgcaccagcttgtcaggtgacttgccagcaccctgagcccctggcgtgccctgtccaatgcgtcgagggatgccatgcacactgccccccagggaagatcctcgatgaactcctgcagacctgtgtggacccagaggattgccctgtttgtgaagtggctgggcgccggttcgccagtggaaagaaagtgaccctcaacccatccgacccggaacattgtcagatttgccattgtgatgtggtcaacctgacgtgcgaggcgtgccaagagcccggcgggttggtggtcccgccgaccgacgcacccgtgtcgcctaccaccttgtacgtggaagatatctccgaaccgccactccatgacttctactgctcacgcttgctggatcttgtgttcctgctggatgggtccagcaggctttctgaagccgaattcgaagtgctgaaggcattcgtggtggatatgatggaaagactgagaatctcgcagaagtgggtcagggtggcagtggtggagtaccatgatggatcacatgcctacataggactgaaggacaggaaaagaccatcagaactgagaagaatcgcatcacaggtgaaatacgcaggaagccaggtggcttcgacttctgaagtcctgaagtacactctgttccagatcttctcaaagatcgaccggccagaagcgtcgcgaatcactctgctgctgatggcctcgcaggagccacagcgcatgtcgaggaacttcgtccggtacgtgcaaggcctgaaaaagaagaaggtcatcgtcatccctgtgggaatcggaccacacgccaacttgaagcagatccggcttatcgagaagcaggccccagagaataaggcctttgtgctgtcctcggtggatgagttggagcagcagagggacgagatcgtgagctacctgtgcgatctcgcacctgaagcgccaccgcctaccctgccaccagacatggctcaggtgacggttggcccaggactgctgggagtgtcaaccctgggaccgaaacgcaacagcatggtgctggacgtggcattcgtgctcgaggggagcgataagatcggcgaggcagactttaatcgctccaaagaattcatggaagaggtcatccaacggatggatgtcggccaggattcgatccacgtgaccgtgctgcagtactcctacatggtcactgtcgaatacccgttctcagaggctcaatcgaaaggcgacatcctgcagcgggtgcgagagatccgctaccaaggaggaaaccgcactaatactggactcgctctgcgctacctgtcggaccactccttcctcgtttcgcaaggagacagagagcaggcgccgaacctggtgtacatggtgaccggaaaccccgcgagcgacgaaatcaaaagactgcctggggacattcaggttgtgcccatcggggtgggtcccaacgccaacgtgcaggagcttgaacgcatcggatggccgaacgctccaattctcatccaagacttcgagactctgccgcgggaggccccagacctcgtgcttcagaggtgttgctccggtgagggcctccaaataccgaccttgagcccagcccccgactgctcccaacccctcgacgtgatcctgctgcttgatggctcttcgtcctttccggcctcctactttgacgaaatgaaatccttcgcaaaggccttcatctccaaggctaacatcggaccgcgcctcactcaggtgtccgtgctccaatacggatcgatcaccaccatcgacgtcccatggaacgtggtgccagagaaagctcaccttctctcactcgtggacgtgatgcaacgggaggggggaccgtcgcagatcggcgacgctctcggcttcgccgtgcggtacctgacctccgaaatgcatggcgcacgcccgggggcatcaaaggcagtggtcatcctggtgaccgacgtctctgtggattcggtggatgcggcagctgacgcagccagatcaaaccgggttaccgtgttcccgatcggaatcggcgacagatacgatgcggcccagctccgcatcttggccggcccggctggagacagcaacgtggtcaagctccaacggatcgaggatctgccaactatggtgacgctgggaaacagcttccttcacaaactgtgctccggctttgtcagaatctgtatggatgaagatggtaatgaaaagcgcccgggagatgtgtggaccctcccggaccagtgccacacggtcacttgccagccggacggtcaaaccctgctgaaatcacacagggtcaactgcgatcgaggcctgcggccatcctgcccaaactcacagtcaccggtcaaggtcgaagaaacttgtggatgccggtggacgtgtccatgcgtgtgcaccggctcctcaactagacatatcgtgacctttgacggccagaatttcaagctcactggatcctgttcgtacgtcctttttcaaaacaaggagcaagatctggaggtgattttgcacaacggagcctgttcccctggcgcgcggcaagggtgcatgaaaagcatcgaggtcaagcacagcgctctgagcgtcgaactgcacagcgacatggaggtgaccgttaatgggagactcgtgtcagtgccatacgtcgggggaaatatggaggtaaacgtgtatggggcgatcatgcacgaagtgcggtttaatcatctgggacatatcttcactttcactccacagaacaatgagttccagctccaattgtcgcccaagacctttgcctcaaaaacctacggcctctgcggaatctgcgatgaaaacggcgccaacgacttcatgctcagagatggaaccgtaacgaccgattggaaaactcttgtccaggaatggactgtccagcggcctggacagacttgccagcctatcctggaggagcagtgcctggtgccggactcctctcactgccaagtcctcctgctgccgctgtttgcagagtgtcacaaggtcctggcccccgcgaccttttacgccatctgccagcaggattcgtgtcatcaggagcaagtgtgcgaagtcatcgcctcttacgcacatttgtgcagaactaatggagtgtgcgtcgactggcgcactccggacttctgcgctatgtcctgtccgccgtcgctggtctataatcactgcgaacacggctgtcctcgccactgcgacggaaacgtgtcctcatgtggtgaccacccatccgaaggatgtttctgcccgccggataaagtcatgcttgaaggatcctgcgtgccggaggaagcgtgtactcagtgcatcggagaggatggagtgcagcaccagtttcttgaggcgtgggtgcctgatcaccaaccgtgccaaatttgcacctgcctgagcgggaggaaggtgaactgtaccacccaaccgtgcccaacggctaaggccccaacttgtggtctgtgcgaggtggccaggctccgccaaaacgccgaccaatgctgcccggaatatgagtgcgtgtgtgatccagtgtcgtgtgatctcccacctgtgccgcactgcgaacgcggcctccaacccaccctgactaatccgggagagtgcagaccgaactttacctgcgcctgccgaaaagaagaatgtaagcgggtcagcccgccttcgtgccccccgcataggctgccaactttgcgtaagactcaatgctgcgatgaatacgaatgtgcctgcaactgtgtcaacagcaccgtgtcctgtcctctgggatacctggcctccactgcaacgaacgattgcggctgcactactactacctgtctgccagacaaggtttgcgtgcatcggtcaactatctacccggtgggccagttttgggaagaaggatgcgacgtctgcacttgtaccgacatggaggatgcagtcatgggactccgggttgcccagtgttcacagaagccgtgcgaagattcttgcagatcaggattcacgtacgtgctgcatgagggcgaatgctgcggccgctgcctgccatccgcctgcgaggtcgtcactggatccccacggggagattcgcagtccagctggaaaagcgtcggatcccagtgggcgtcccctgagaatccttgcctgattaatgagtgcgtgcgggtgaaagaagaggtgttcattcagcagaggaacgtctcctgcccgcaacttgaagtccctgtctgcccatcaggcttccaactgagctgcaagacttccgcatgctgcccgtcatgccggtgcgagcggatggaagcctgcatgttgaacggaacggtgatcggtcccggcaaaaccgtgatgatcgatgtgtgcaccacttgtagatgcatggtgcaagtgggagtgatctccgggtttaagctcgagtgtagaaagactacttgtaacccatgcccgctgggttacaaggaggagaataacaccggagaatgctgtggacggtgcctgccgaccgcgtgcaccatccagctgcggggtgggcagatcatgacgctgaaacgggatgaaaccctgcaagacggttgcgatactcacttctgtaaggtgaacgagcggggagagtacttctgggagaagagggtaactggttgcccaccattcgatgagcataaatgcctggccgagggagggaagattatgaagattcctggaacctgctgcgacacctgtgaggaacccgagtgcaatgatatcactgcgcgcctccagtacgtcaaagtggggtcctgcaagtccgaagtcgaggtggacatccattattgccaaggaaagtgcgccagcaaagccatgtacagcatcgacatcaatgacgtgcaagatcagtgtagctgttgctcgccgacccggaccgagccgatgcaggtggcattgcattgcaccaacggaagcgtggtgtaccacgaggtcctgaacgccatggaatgcaagtgctcaccgcggaagtgcagcaag

SEQ ID NO: 21368 - DNA, 8439 bp, synthetic construct
  misc_feature 1..8439: note = source = /note="Description of Artificial Sequence: Synthetic coding sequence"
  source 1..8439: mol_type = other DNA
atgatccctgcccgttttgcaggtgtgctgttagccctggcgttgatcttgcccggaactttgtgtgcggaggggacccgagggagatcctcaacagcgaggtgttcattgtttggttccgactttgtaaataccttcgatgggagcatgtacagctttgcaggatattgcagttacctccttgccgggggatgccagaaacggtccttcagcataattggtgacttccagaacggcaagagagtgagcttaagtgtgtatctgggggagttttttgatattcacctgttcgtcaatgggactgtgacacaaggggatcaacgagttagtatgccttatgcgtcgaagggtctgtatctagagactgaggccggctattacaagctgagcggtgaagcatatggatttgtggctcgtatcgatggctccggcaattttcaggttcttcttagtgaccgatacttcaataagacttgcggcttgtgtggcaactttaacatttttgcagaagacgattttatgacccaggagggcaccctgactagtgatccatacgactttgccaattcttgggcgttgtctagcggcgaacaatggtgcgagcgggcgtcgcccccctccagctcgtgtaacatcagctccggagaaatgcagaagggactgtgggaacagtgccagctgctgaagtccacctccgttttcgcaaggtgtcaccctcttgtggatccagagccgttcgtggccctgtgcgaaaagactctttgtgagtgtgccggtgggctggagtgtgcgtgtcccgctctgctggagtacgcccggacatgcgctcaggagggcatggtgctctacggctggaccgatcatagtgcatgcagcccggtttgccccgccggaatggaataccgccagtgtgtgagtccctgcgctaggacctgccagtctctacatatcaacgaaatgtgtcaggagcgctgcgtggacggttgcagctgcccagagggccagctgctggatgaaggattatgcgtggagtcaaccgaatgcccatgtgtgcatagcggaaagagatacccacccggtaccagcctgtccagggactgtaatacgtgtatatgcaggaattcacaatggatttgctccaacgaagagtgtcccggcgagtgcctcgttaccgggcagagtcactttaagagttttgacaacaggtattttacattctctggcatttgccagtatctgctcgctcgcgactgtcaggaccattctttctctattgtcatcgaaactgtgcagtgtgcagatgaccgagacgcggtctgtaccagatctgtgacagttcgactgcccggcctgcataattctctcgttaagctcaagcacggtgcgggcgtggctatggacggccaggacgtgcaactaccccttttaaaaggcgacctacgcatacaacacacagtgactgcttccgtgaggctctcatatggcgaggacctgcaaatggactgggacggcagggggagactgcttgtaaaactcagtcccgtctatgcggggaaaacatgtggcctgtgcggcaactacaacggaaatcagggcgatgacttcctcacaccctcagggctggcggaacccagagtcgaagatttcgggaatgcatggaaactgcacggcgactgtcaagatctgcaaaagcagcactcagatccatgcgctttgaaccctcgtatgacacgcttttcagaggaggcctgtgcagtgttaacctctcctactttcgaggcatgccatagggcagtgagccccctgccatacttacggaactgcaggtacgacgtgtgttcctgttcggatggaagagagtgtctttgtggcgccctagcctcttatgctgccgcatgtgcaggccggggcgttcgtgttgcctggagggaacctggtcggtgtgagctgaattgccctaaggggcaggtgtatctgcagtgcggcaccccctgtaacttgacttgccgcagcctttcatatccagatgaggaatgcaacgaagcttgtctcgaggggtgtttctgtccccccgggctgtatatggatgaaaggggagattgcgtgccaaaggctcagtgtccttgttactatgacggtgagattttccagcctgaagacatttttagcgaccatcacacgatgtgctattgtgaagacggatttatgcattgtacaatgtcaggggtgcctggcagcctcttgccggacgcagtgctaagcagccccctgtctcatcgtagtaaacgttctcttagctgcaggccacccatggttaaacttgtgtgcccagccgacaatttacgcgcagaaggactggagtgcaccaaaacctgccagaattacgatttggagtgtatgtccatgggctgcgtgtcaggatgcctctgcccacccggcatggtccgtcacgagaacaggtgcgtcgcactcgaaagatgcccctgtttccatcagggcaaagagtacgctccgggggagactgttaagatagggtgtaacacctgtgtgtgtcaggatcgaaaatggaactgcacagatcacgtgtgtgacgccacatgcagcaccataggaatggctcactatctgaccttcgacgggctcaaatacttattcccgggggaatgccagtatgtcctggtccaggactattgtggctctaatccaggaacgttcagaattttggtcgggaacaagggatgttcccatcccagcgtcaaatgcaagaaaagagtgactatacttgtggaggggggcgaaatcgagctgttcgacggagaggtcaatgttaagcggcctatgaaagacgagactcatttcgaagtggtagaaagtggcaggtacattatcctgctacttggcaaggcgctctcagtggtgtgggatcggcatctgagcataagtgtagtgctgaagcaaacttaccaggagaaagtttgtgggctgtgtgggaactttgacggtattcaaaacaatgacctaacgtcttccaacctgcaggtggaagaggatcccgtggattttggcaacagctggaaggttagctcccaatgcgcggacactagaaaagtcccattagattcttcacccgccacctgccataacaatataatgaaacagaccatggtggacagtagctgcagaattctgacgtcggacgtcttccaggactgtaacaaattggtcgatcctgaaccgtatctcgacgtgtgcatttatgatacctgcagttgcgaatccatcggtgattgtgcttgcttctgtgacaccatcgccgcgtacgcccacgtttgtgcgcagcacgggaaggttgttacatggaggactgccactttgtgcccgcagtcgtgcgaggagagaaatttgagggaaaatgggtatgaatgcgagtggcgctacaactcttgcgcccccgcgtgtcaggtgacgtgccagcatcccgagcccctagcctgccctgttcaatgcgtagaaggatgccatgcccattgtccccccgggaagatactggatgagctcctccaaacgtgtgtcgatccggaagactgtccagtttgtgaggtcgctggacggcgctttgcgtcgggcaaaaaagtgacacttaatccgtccgatcccgaacactgccaaatctgtcattgcgatgtcgtcaatttgacatgcgaggcatgccaagaaccaggcggcttagtggtgccccctaccgacgcccccgtaagccctaccacgttgtatgtcgaggacatcagtgagccccctttgcatgatttttactgctcccgtctgctggacctggtctttctgctcgacggttcctctcggctttcggaagctgaattcgaagtacttaaggccttcgtggtggatatgatggaaaggctgagaatatcccaaaagtgggtcagagtggctgtggtggaataccacgacgggtcccacgcatacatcgggcttaaagatcgcaagcggccttccgaattgcgacgcatcgcatcccaggtgaaatacgccgggtcacaggttgcctctactagcgaagtgcttaaatacacactgtttcagatcttttccaaaattgaccggcccgaggcctcacgaatcactcttctcctcatggccagccaggagccacagaggatgtcacggaactttgtacggtatgttcagggcctgaaaaagaaaaaggtaatcgtgataccagtaggaattggcccccacgcaaacctgaagcagattaggctcatcgaaaaacaagcaccggagaacaaggcgtttgtgctttcttcagtggacgagctggagcaacagcgggacgagatcgtttcgtatctctgtgatctggcaccagaagcccccccgcccactctcccccctgacatggcacaggtgaccgtcggtcccggtctgctgggggtttccacgttaggacccaagcgcaactccatggtgctggacgtggcttttgtcctagaaggttccgacaaaatcggagaggcagacttcaatcgcagcaaagaatttatggaggaggtcatacagaggatggacgttgggcaggattccattcatgtgacagtactgcagtatagctatatggtgactgtggaatacccattcagtgaggcccagagtaagggggacattctgcaaagggtgagggaaatccgctaccaaggcgggaatagaacaaataccggcctggctctgaggtacttgtcagaccactcttttctggtaagccagggtgatagagagcaggcacccaatctggtctatatggtgaccggcaatccagccagcgatgaaattaaacgcctgcccggggatatccaggttgtgcccattggggttggaccaaatgccaacgtccaagagttggaaagaatcggctggcctaacgcccccatattgatccaggacttcgagacactgcctagagaagcgcccgatctggtgctccagagatgttgttccggcgagggacttcaaatcccgactctatccccagcgccagactgtagccagcctctggacgtcattctccttctggacgggtcaagctctttcccagcctcctactttgacgaaatgaagagctttgccaaggcctttatatccaaggccaatattggccctcgactgacccaggtgagtgtgctccagtatgggagtataaccacaattgatgtcccatggaatgttgttcctgagaaggcgcacctgctgagtctggtggatgtcatgcagcgcgagggagggccgtctcagataggcgatgcgcttggtttcgccgtgagatatctgacgtcagaaatgcacggtgcccgacccggtgcttccaaagctgtagtgatactggtgacagatgttagcgtggattctgtggatgccgctgcagacgcagctcgatctaatcgggtcactgtgtttccaattggaattggggaccgctatgacgcagcccagcttcgcatcctggctggtccagccggcgattctaacgttgtcaagctgcagaggatcgaagaccttcctactatggtgacccttggcaactcctttctccacaaattgtgcagcggctttgtcagaatttgtatggatgaggacggaaatgagaaaagacccggggatgtgtggactcttcccgaccaatgccacacagtgacttgccaaccagacggacaaactctgctgaagtcccacagagtgaattgtgacaggggactcagaccgagctgtcccaatagtcagtcaccagtcaaagtggaggaaacgtgtggctgtagatggacatgtccctgcgtatgtactggctcttcaaccaggcacattgtgacgttcgacgggcagaacttcaagctcactggctcatgctcctacgtgctgttccagaataaggagcaagatctcgaggttatcctccacaacggcgcctgctcccccggtgctaggcaggggtgcatgaagagtattgaggtcaagcactccgcattgtcagtggagcttcacagcgacatggaggtgactgtgaatgggaggctggtgtcggtgccctatgtcggcgggaatatggaggtgaacgtctatggagccattatgcacgaggtgcggtttaaccaccttggccatatctttacattcactccacagaataacgagtttcagctacagctttcccccaaaaccttcgcatcaaaaacatacggactttgtggcatatgtgatgagaacggcgctaacgactttatgttgagagacggaacagtgactactgattggaaaacactggtacaggagtggaccgtgcaaagacccggtcaaacctgtcagccgatcctagaggaacagtgtcttgtgccagactcctcccattgccaggtgctcctgcttccgctcttcgcagagtgccataaggtgctcgcccctgccacgttctatgccatctgtcagcaggattcgtgccaccaagagcaggtgtgcgaggtaatcgcttcctacgcccacctgtgccgaacaaacggggtgtgtgtagattggcggacccctgacttttgtgctatgtcctgtcctccctctctagtgtataaccattgcgagcacgggtgtccccggcattgtgacggcaacgtgagctcctgcggcgatcatccttccgagggttgtttttgcccgcccgacaaggtgatgctcgaggggagctgtgtccctgaagaagcgtgcacacagtgcataggagaggacggcgttcagcaccagtttcttgaggcttgggtgcctgaccaccagccttgtcaaatatgcacatgccttagcggcagaaaagttaactgcaccacgcagccttgcccaacagctaaggctcccacgtgcgggctgtgcgaggtggcccgtctgcggcagaatgccgaccagtgctgtccggagtacgagtgtgtgtgcgatcccgtgtcttgtgaccttcccccagttccgcactgcgagcggggtctccagccgacactgactaatccgggagagtgcagacctaacttcacatgtgcgtgcagaaaagaggaatgtaaacgcgtcagtccacccagttgcccccctcaccggctgccaaccctcaggaagacccagtgttgcgatgagtacgagtgcgcctgtaactgtgtaaatagcacagtatcctgccctctcgggtacctggcgtccacggccacaaacgattgcgggtgcaccacgactacctgtcttcccgacaaagtatgcgtccatagaagtaccatctaccccgtaggacagttctgggaggaagggtgcgacgtgtgtacttgcactgatatggaagacgccgtcatggggttgagagtggcccagtgcagtcagaagccctgcgaggacagttgtcgaagcgggttcacctatgttttgcacgagggagagtgctgcggcagatgtctgcctagtgcttgcgaagtggtcacggggtccccccgcggcgattctcagtccagttggaaatccgtgggctctcagtgggcatctccagagaatccctgcctgattaacgagtgtgtcagagtcaaagaggaagtcttcattcaacagcgtaacgttagctgcccccagcttgaggtccctgtgtgtccttcaggattccagctctcttgcaaaacctccgcatgctgtccttcttgcagatgcgagcgaatggaggcctgtatgttaaatggcacagtgattggccctgggaagacagtgatgattgacgtatgtacgacatgccgatgtatggtgcaagtcggggtcataagtggattcaaacttgagtgtagaaaaaccacatgtaatccctgtcctctggggtacaaagaagagaacaataccggagagtgctgcggcagatgcctgccaaccgcttgtacaatacagctcaggggaggccagatcatgaccctcaagcgcgacgaaaccttgcaagacgggtgcgatacacatttttgtaaggtgaacgaaagaggcgaatatttttgggagaagcgagtgacagggtgccctccttttgacgaacacaagtgccttgccgaaggtggcaaaattatgaagatacctggtacttgttgcgacacgtgcgaggagcccgaatgcaacgatattacagcgaggctccagtacgtcaaagtcggcagctgtaagtccgaggtcgaggtggatatacactattgtcagggaaagtgcgcttctaaggcaatgtacagcattgatatcaatgacgtgcaggaccagtgtagctgctgctcccccaccagaactgaaccgatgcaggtggccctccactgcactaatggtagcgtggtttaccatgaggttctgaacgcaatggagtgcaaatgcagccctcggaaatgctccaaa

SEQ ID NO: 21369 - DNA, 8439 bp, synthetic construct
  misc_feature 1..8439: note = source = /note="Description of Artificial Sequence: Synthetic coding sequence"
  source 1..8439: mol_type = other DNA
atgattcctgcaagatttgcaggagtgctgctggccctggccctgattcttcctggtactctgtgtgcggaagggacccgaggacgttcaagcaccgctagatgctcacttttcggttcagattttgtgaacaccttcgatgggtcgatgtacagctttgctggttactgttcttatctgcttgcaggcgggtgtcaaaagcgcagcttttcaattatcggggattttcagaacggcaagagagtgtcactttcggtgtatctgggagaattcttcgatatccacctgttcgtgaatggaactgtcactcagggagatcagcgggtatcgatgccatatgcgtcaaaaggactttaccttgagacggaggccgggtactacaagctgtccggcgaagcgtacgggttcgtggcacgaatcgatgggtcaggaaactttcaagtgcttctttctgacagatactttaacaagacctgcgggttgtgcggaaacttcaatatctttgcagaagatgatttcatgacccaagaggggaccctgactagcgacccatatgatttcgcaaattcgtgggcactctcgtcgggggagcaatggtgtgagcgggctagcccaccatcgtcgtcatgcaacatatcgtcaggcgagatgcagaaaggactgtgggagcaatgtcagctgctcaagtccacctcggtgttcgcacgatgccatcccctcgtcgacccagaaccttttgtggcgctttgcgaaaagaccctctgtgaatgtgcaggaggacttgagtgcgcatgtcctgcacttcttgagtacgcccgcacgtgtgcacaagagggtatggtgctgtacgggtggaccgaccatagcgcatgttcacctgtctgccctgcaggaatggagtaccgacagtgcgtcagcccttgcgccagaacctgccagtcgcttcacattaatgaaatgtgtcaagaaagatgtgtcgacgggtgttcatgtccggaagggcagcttctcgatgaagggctgtgcgtggaatccacggagtgcccgtgtgtccattccgggaagcggtatccacccggaacctctctttcgagagattgtaatacttgtatttgtagaaactcacaatggatctgctcaaatgaagagtgtccaggggaatgtttggtgactggtcaaagccacttcaagagcttcgataatagatactttacgttctcggggatctgccaatatctgctggcacgggattgtcaagatcactccttttcgatagtgattgaaaccgtccaatgtgcagatgatcgagacgctgtgtgtactcggtccgtcaccgtgagactgccaggactgcataatagccttgttaagctgaagcatggagcaggtgtcgcaatggatggtcaagacgttcagctcccactgcttaagggcgatttgagaattcaacataccgtgaccgcctccgtcaggctgtcatacggtgaagatctgcagatggattgggatggacgcggcagactgttggtgaagctctcgcctgtttacgcaggaaagacctgtgggctgtgcggcaattacaacggaaatcaaggagatgattttcttactccttcagggcttgcagaaccacgagtggaggactttggaaatgcctggaaactccatggtgattgccaagaccttcaaaagcagcactcagatccttgtgctcttaatcctaggatgactcggttttcagaggaggcatgtgcagtccttactagcccaactttcgaagcatgccatagagcagtgtcgccccttccttacttgcgaaattgtcgttacgatgtctgttcgtgttccgacggtagagaatgcctttgtggtgcacttgcctcatacgcagcagcctgtgccggtcgcggagtgcgagtggcctggagggagccaggtaggtgtgaacttaattgtccaaaggggcaggtctacctgcagtgtgggaccccatgtaacttgacttgtagatccctttcctatccagatgaggaatgcaacgaagcatgcttggaaggatgtttctgccctcccggactttacatggacgaaaggggagactgcgttccaaaggcccaatgcccttgttactacgacggggaaatctttcaaccagaggatatcttttccgatcatcataccatgtgctactgtgaggatggatttatgcattgtactatgagcggtgtgccgggttctctgctgccagatgccgtgctgtcgtcccctctgtcgcatagatcaaagagatccctgtcgtgccgccctccaatggtgaagctcgtgtgtccagcagataaccttcgtgcagagggccttgaatgtaccaagacctgtcagaattacgatcttgagtgtatgtcgatgggctgtgtgtcaggatgtttgtgtccccctggtatggtgcgccatgaaaatcgatgcgtggcacttgaaagatgcccatgtttccaccaggggaaggaatacgcacctggagagactgtcaaaattggttgcaatacttgtgtctgtcaggatcgtaagtggaactgcaccgaccacgtgtgcgatgcaacctgtagcaccattggaatggcacactacctgacttttgatgggcttaagtacctttttccgggtgagtgtcagtacgtcctggtccaggattactgtggctcgaaccctgggacctttcggatcctggtgggaaataagggttgctcacatcccagcgtgaagtgcaagaagagggtcaccattcttgtggaaggaggtgaaattgaactctttgatggcgaagtgaacgtgaagcgccctatgaaagatgagactcatttcgaggtcgtggaatctggacggtacattattctgttgctgggtaaggcactctcggttgtgtgggatagacacctttcaattagcgtggtgcttaagcaaacttaccaagaaaaggtctgtggactgtgtgggaactttgacggtattcaaaacaacgatttgacttcttccaacctccaggtcgaagaagatccagtcgacttcggtaactcgtggaaagtttcgtcgcaatgtgcggatactaggaaggtgcctttggattcctcaccagcaacctgtcataacaacatcatgaagcaaaccatggtggattcgtcctgtcggattctgacctctgatgtgtttcaagattgcaacaagctcgtggatccagaaccttaccttgacgtctgtatctatgacacttgctcgtgtgagagcataggggattgcgcctgcttctgcgataccattgcagcctacgcccatgtgtgtgcacagcatggcaaggtcgtcacttggaggaccgcaaccctgtgtcctcagtcctgtgaagagcgcaaccttcgggaaaatggctacgagtgtgagtggaggtacaactcctgcgctccagcgtgccaagtcacctgtcaacaccctgaacctcttgcctgtccggtgcagtgtgtggaaggttgccatgcacattgtccacctggaaagattcttgatgaacttctccaaacgtgtgtagaccccgaagattgccctgtctgtgaagtggcgggaagaaggtttgcatccggaaagaaggtgacgctgaatccttccgatccagaacattgtcaaatatgtcactgtgatgtggtgaacctcacttgcgaagcctgtcaagagcccggaggcctggtggtgcctccaaccgacgcgcctgtcagccctacgaccctttacgtggaggatatctcggaacctccactgcatgatttctactgttcccggctcctggaccttgtgttccttcttgacggttcaagcagacttagcgaagcagaattcgaagtgctgaaggcattcgtcgtggatatgatggagcgtctgagaatcagccagaagtgggtcagagtggcagtggtggaataccatgacgggtcccatgcatacatcggcctgaaggaccgcaagcgcccttctgagcttcggagaatagcttcacaggtgaagtacgcaggatcacaggtggcgtcaacctcagaagtgcttaagtacaccctttttcaaatcttcagcaagattgacaggcctgaagcatcaagaatcaccctgctgttgatggcatcgcaagaacctcagagaatgtcacgcaattttgtcaggtacgtgcagggactgaagaagaagaaggtcatcgttatacccgtgggtatcggacctcacgcaaatcttaagcaaataagacttattgagaagcaggcacctgagaacaaggcctttgtgctgtccagcgtggatgagctcgagcagcagcgagacgagattgtgtcctacttgtgtgatctcgcacctgaagcacctcctccgaccctccccccagatatggcgcaagtcactgtggggcctggactgcttggagtctctactctcggtcctaagcgcaattccatggtgcttgacgtggcgtttgtgcttgagggctcagataagatcggggaggcagactttaatcgtagcaaagagtttatggaagaagtgattcagagaatggatgtggggcaggattcgattcatgtgaccgtccttcagtacagctatatggtcaccgtggaataccctttctctgaagcacagagcaaaggcgatatacttcaaagggtccgcgaaattaggtaccaaggtggtaatcggaccaacactgggctcgcactgcgctacctgagcgaccacagctttcttgtctcccaaggagatcgcgaacaggcacctaacttggtctatatggttaccggaaaccctgcttccgacgaaatcaagcgtttgccaggtgacatccaggtggtcccgattggagtgggacctaatgcaaacgtgcaagaattggagcggatcggatggcctaacgcacccatccttatccaagactttgagactcttcctcgcgaagcacctgatctggtgctgcagaggtgttgttccggagaaggcctgcaaattccaaccctctcaccagctcccgactgctcacagccactggacgtcattctgcttctggacggtagctcctcattcccggcgtcctactttgatgaaatgaagtcattcgcaaaagcatttatcagcaaagctaacattggccccagactgactcaagtctcagtgctgcaatacggatccattactactattgatgtgccctggaacgttgtgcccgaaaaggcacatctcctcagcctcgtggatgtgatgcagcgcgaaggaggacccagccagatcggcgatgcacttggatttgcagtcaggtatctgacgtcggaaatgcacggggcacgccccggggcatcgaaagcagtcgtcatccttgtcactgatgtctccgtggacagcgtggatgcagccgcagacgccgcacggtcgaatcgtgtgactgttttcccaattggtatcggagatcgttacgacgccgcgcaactcagaatcttggctggaccagcaggagattccaatgtggtgaaactgcaacgcatcgaagatctgcctactatggtgacccttgggaactccttcctgcacaaactttgttcaggatttgtgagaatatgcatggatgaggacggaaacgagaagcgaccgggcgatgtgtggaccctgcctgatcaatgccatacggtgacttgccagcctgatggtcagactctgctgaagtcgcatcgcgtgaactgcgacagaggtctgaggccaagttgtccgaattcccagtcgccagttaaggtggaggaaacctgtgggtgcagatggacgtgtccatgcgtgtgtaccggttccagcacccgtcatattgtgacctttgacggccaaaacttcaagttgaccggatcttgctcgtacgtgctgtttcagaataaggaacaggacctcgaggtgattctccacaacggtgcttgtagcccaggggccaggcaaggatgcatgaagtcaatcgaagtcaaacattcggcgctgtcagtggagctccattcggatatggaggtgacggtgaacggtcgtcttgtctctgtcccttacgtgggagggaacatggaagtcaacgtctacggagcgatcatgcatgaagtgagattcaaccacctcggtcacattttcaccttcactccacagaataacgagtttcagctgcaactttcccccaaaacgttcgcatcaaaaacctacggcctgtgtggtatctgcgacgaaaacggagcaaacgacttcatgcttagagacggaaccgtgactactgactggaaaaccctggtgcaagagtggactgtgcagcggcccggccaaacctgtcagccaattcttgaagaacaatgcttggttccagattcgtcgcattgtcaagtgctccttctccccctgtttgcagagtgtcacaaggtgctcgcgcctgccactttttacgccatctgtcagcaggattcgtgtcatcaagagcaagtctgcgaggtcattgcttcctacgcccacctgtgccggactaacggcgtgtgcgttgattggcgaaccccagacttctgcgccatgtcgtgtccaccctccctcgtgtacaatcattgtgaacatgggtgtccccgacattgcgatggaaatgtctcctcgtgtggagatcatccgtccgagggatgtttttgtcctcccgataaagtcatgctggaaggaagctgtgttcctgaagaagcatgtacccagtgtataggcgaggatggggtgcaacatcaatttcttgaagcatgggtgccagaccatcagccatgtcaaatttgtacttgtctctccggcaggaaggtgaactgcaccactcaaccttgtccaactgccaaggcaccaacctgtgggctttgcgaggtcgcaagactccgtcagaatgcagatcagtgttgcccggagtacgagtgtgtgtgcgatccagtctcctgcgatctgccacctgtgcctcattgtgagaggggtctgcaacctaccctgaccaaccctggagaatgtcgccctaatttcacctgtgcatgtcggaaggaagaatgtaagagagtctcgcccccttcatgtccccctcacaggcttcctacccttcgaaaaacccaatgttgcgatgaatacgagtgcgcctgcaactgtgttaattcgacggtttcctgtccactgggctacctggcatccaccgctaccaacgactgtgggtgtaccaccactacttgtctgcccgataaggtgtgtgttcatagatcgaccatttaccctgtcggacagttttgggaggagggctgtgatgtctgcacttgcaccgacatggaagatgccgtcatgggccttagagtcgcacaatgttcccagaagccctgtgaagattcatgtcgatcaggatttacctacgtgttgcatgagggtgagtgctgtggacgctgtctgccctcggcctgcgaagtggtcactggaagccctaggggtgattcacagtcctcctggaagagcgtcggttcacaatgggcgagccccgaaaacccgtgtttgattaacgaatgtgtgagagtgaaggaagaggtgtttatccaacagcggaacgtttcatgtccacagcttgaagtgccagtctgtccgagcggatttcaactttcctgtaaaacttcagcatgttgtccgagctgccgttgcgagagaatggaggcgtgtatgctcaacggaactgtcattggccccggaaagactgtgatgatagatgtctgcaccacctgcagatgtatggtgcaagtcggggtgattagcggttttaagctcgagtgtagaaagaccacctgtaatccctgtccgctcggatacaaagaggaaaacaacaccggggagtgttgtggacggtgcctgcctaccgcatgtacgattcaactgcggggtggtcagattatgacgctcaagagggacgaaactctccaagatggttgtgatactcatttttgtaaggtgaacgaaaggggtgagtacttctgggaaaagcgggtgacgggatgtcctccctttgacgaacacaagtgtctcgccgaagggggaaagataatgaagattcccggtacttgctgtgatacttgtgaagaaccggaatgcaatgatattactgcccgcctgcaatacgtgaaggtggggtcctgtaagagcgaggtcgaagtggatatccattactgccaagggaaatgcgcatcaaaggctatgtattcgatcgacattaacgatgtgcaggatcagtgctcctgctgtagccctacccgaactgaaccaatgcaggtggccctgcattgtacgaatggttccgtggtgtaccatgaggtgcttaacgccatggaatgtaaatgttcgcctagaaaatgttccaag

SEQ ID NO: 21370 - DNA, 8439 bp, synthetic construct
  misc_feature 1..8439: note = source = /note="Description of Artificial Sequence: Synthetic coding sequence"
  source 1..8439: mol_type = other DNA
atgatccccgcccgcttcgcgggcgtcctgctcgcattggctctcattctccccggcacgctgtgcgccgaggggactcgcggtcgttctagcaccgcccgttgctcccttttcggctctgactttgtgaacactttcgacggcagcatgtacagcttcgccggatattgtagttacctcttggccggcggatgccagaaacggtccttctccatcattggggatttccagaacggtaagcgcgtatcgcttagcgtctacctgggcgagtttttcgatatccacttgttcgtgaacggtacagtcacccagggagaccagcgagtctccatgccctacgccagcaagggtctttacctggagaccgaggcgggatactacaagctgtccggagaggcatacggattcgtcgcccggatcgatgggtcgggaaatttccaggtcttgttgagcgatcgttatttcaataagacttgtggcctgtgcggaaatttcaatatctttgctgaggacgacttcatgacacaggaggggaccctgacgagcgacccttacgactttgcaaactcctgggctctctcctctggcgagcagtggtgcgagagggcttctcctcccagctcatcgtgcaatatcagttcgggcgagatgcaaaagggcctgtgggagcagtgccaacttctaaagtcaactagcgttttcgctcgttgccacccgctcgtcgacccggagcccttcgtcgctctgtgtgagaagaccttgtgcgaatgcgccggcggtctggaatgcgcgtgtcctgccctgctcgaatacgcgcggacgtgtgcccaggagggaatggtcctctatggctggacggaccactccgcatgttctcctgtctgccctgcaggtatggagtaccggcaatgtgtgtcgccctgcgcaaggacttgccagagcctgcacattaatgagatgtgtcaggagaggtgtgtggacggttgttcctgcccagagggtcaactacttgacgagggtctgtgcgtcgaaagcacggaatgtccgtgcgtccatagcggcaagagatacccccctgggacgtccctttccagggactgcaacacctgcatctgccgtaactcccagtggatatgttcgaatgaagagtgccccggcgagtgcctggtgaccggtcagtcccattttaagagcttcgataatcgttacttcacattctcggggatctgccagtatttgctcgctcgcgactgtcaggaccactcgttctctatcgtaattgagaccgtccagtgcgctgatgaccgcgatgcagtctgcacacgctccgttaccgtccggctccccggtctgcataacagccttgtcaagctcaagcacggcgcaggtgtcgctatggacggacaagacgttcagctcccgctccttaagggagatctgcgcatccagcacactgtcaccgcctctgtccgcctgtcgtacggtgaggacctgcagatggactgggacggcagaggtagattgctggtgaagctgtctccggtctacgcgggcaagacctgcggtctgtgcggtaactacaatgggaatcagggtgacgacttcctgacccctagcggtttggccgagccgcgtgtggaggatttcggcaacgcttggaagctgcatggcgattgccaggacctccagaagcagcactccgacccctgcgccctgaacccgcgcatgacacgtttctcggaggaggcctgtgcggttctcactagcccgactttcgaggcctgtcaccgtgctgtctcccccttgccttacctccgcaactgccggtatgacgtctgctcttgtagcgatggccgtgaatgcctatgcggcgccctggcctcttacgccgcggcgtgcgccggccgaggcgtccgcgtagcctggagagagcctggacgttgcgagctcaactgtccaaagggtcaggtctacctccagtgcggtaccccctgcaatttgacctgccggagcctgtcttatcctgatgaggagtgcaacgaggcttgcctcgaagggtgcttctgcccgcctggcctctacatggatgagcgtggtgactgcgtcccgaaggcccagtgcccttgctactacgatggcgagattttccagccggaggacatcttctccgatcaccacactatgtgctactgcgaagatggcttcatgcattgcaccatgtccggagttcctggctccctcctccccgacgccgtcctgtcatctcctctgtctcaccggagcaagcggtcgctgagttgtaggccccctatggttaagctcgtgtgcccggccgacaaccttcgggccgagggtctcgagtgcaccaagacctgtcagaactacgacttggagtgcatgtccatggggtgcgtctccggctgcctgtgcccgcctggcatggtccggcatgagaatcggtgtgtagcccttgagcgatgtccgtgcttccaccagggtaaggagtacgccccgggtgaaactgttaagattgggtgtaacacttgcgtatgccaagatcggaagtggaactgtaccgatcacgtatgcgacgccacctgcagcactattggtatggcccactatttgacgtttgatggtcttaaatatttgtttcccggcgaatgccagtacgtgctcgttcaagattactgcggctctaaccctggaacgttccgtattcttgtgggaaacaaaggctgcagtcacccctccgttaagtgcaagaagagggtcaccatcctcgttgagggcggtgaaatcgagcttttcgatggggaggtcaacgttaaaagaccaatgaaagacgaaacgcacttcgaggtcgtcgagtcgggtcgatacatcattcttcttctgggtaaggcgttgtccgtcgtgtgggatcgtcacctgagtattagtgtcgtcctcaagcagacgtaccaggagaaagtctgcggactttgtggaaattttgacggtatccagaacaacgatctaacgtcgtccaacctgcaagttgaggaagaccctgtggacttcggcaactcgtggaaggtgtcgagccagtgcgcagatacccgtaaggtcccgctggattcctctcccgccacctgtcacaacaacatcatgaagcagaccatggtcgattcctcgtgtcgcatcctcacctcagacgtcttccaggactgcaacaagctggtcgatccagagccctacctcgacgtctgcatttacgatacctgttcttgtgagtctatcggtgattgcgcctgcttctgcgacacgattgccgcctacgcccacgtgtgcgcccagcatggtaaggttgttacgtggcgtaccgcaacgctctgtccgcagtcgtgcgaggaaaggaacctgcgagaaaacggctacgagtgtgagtggagatataacagctgcgcccctgcctgccaggtgacttgccagcaccccgagcccctcgcatgtccagtgcagtgcgtcgagggttgccacgcccactgtccgcccggtaagattcttgatgagctgctacagacctgtgtcgacccagaagattgtccggtctgcgaggttgccggacgtcgttttgcttccggcaagaaggtcactctcaacccttccgatcccgagcattgccagatttgccactgcgacgtggtcaatctcacatgtgaggcctgccaggagccgggtggactcgttgtaccgcccacagatgccccggttagccctaccacgctgtacgttgaggatataagcgagccgcccctccatgatttctactgtagccgtctcctggatctggtcttcttgctggatggctcgtcccgcctgagcgaggcggagttcgaggtgctgaaggccttcgttgtagatatgatggagcgtttaaggatctcgcaaaagtgggtccgcgtcgctgtggtcgagtaccacgacggtagccacgcctacattggtctcaaggaccggaagagaccctctgaactgcgccgcattgcgtcccaagtgaagtacgccggttcccaggtggcctcgacgtccgaagtcctgaagtacaccttattccaaatctttagtaagatcgaccgcccagaagcctcgaggattacgcttcttctgatggcttcccaggagcctcagcgtatgtcccgaaacttcgtccggtacgttcagggccttaaaaagaagaaggttattgtgattcccgtaggtattggccctcacgcgaacctgaagcagatccgcttgatcgagaagcaggcgcctgagaataaggcctttgtgctatcttctgtggacgagctagaacagcaaagggacgagatcgtctcgtatctgtgcgacctggcccccgaggctcctcctcccactctgccccccgatatggcccaggtcaccgtgggaccgggtctcctcggcgtctctacgctcggtcctaagcgaaactctatggttctcgatgtggcttttgtcttggaaggtagtgataagataggggaggccgacttcaaccgaagcaaggagttcatggaggaggttatccagcgcatggacgtcggccaggactcaatccatgtcaccgtcctccagtatagctacatggtcacggtggaatatcctttttccgaggcccagtctaagggcgatatcctccagcgtgtgagagaaatccgttaccagggcggtaaccgtaccaacacgggtctggcgctgcgttacctgtctgaccactctttcctggtatcccagggcgaccgggaacaagctcccaacctggtgtatatggtgaccggcaaccccgcctctgatgagatcaagcgtctgcccggcgatattcaagtggttcccatcggggtcggccccaacgcgaacgtccaggagttggagcgcattggttggcctaacgcgcctatcctcatccaggactttgaaaccctaccccgggaggcgcccgacctggtgctccagcggtgctgctccggcgagggtctgcagatccccaccctgagtccagcgcccgactgctcgcagccgctcgatgtcatccttctgctggatggtagcagcagcttccccgcttcctacttcgacgagatgaaaagcttcgccaaggccttcatctctaaggcgaatatcggaccccggttgacacaggtgtccgtgctacagtacggctcgatcactaccattgatgtcccttggaacgtagtgcccgagaaggctcacctgctgagtcttgttgacgtcatgcagcgtgagggaggtccttcccaaatcggcgacgcgctgggcttcgctgtccgctacttgacctcagagatgcacggtgctcgccctggcgccagcaaggccgtcgtcattcttgtaaccgatgtctcggttgactctgtggatgccgctgccgacgcggcccggtccaaccgcgtcactgtgttccccatcggtatcggagatcgttacgatgctgcccagctccgcatcctggccggacccgctggtgactctaacgtcgtgaagctccaacgcatcgaggatctgccgactatggtcacactgggcaacagctttttgcacaagctctgtagcggcttcgtccgcatttgcatggacgaggatggtaacgagaagagaccaggggacgtgtggacgctcccggatcagtgtcataccgtgacgtgtcagcccgacggccagacacttttgaagtcccaccgtgtcaattgtgatcgtggtctgcgcccttcctgtcccaattcgcagtctccagtcaaggtggaagaaacttgcggctgccgatggacctgcccttgcgtctgcactggttcctcgactagacacattgtgaccttcgatggccagaatttcaagctaaccggttcctgttcttatgtcctgttccagaataaagagcaagaccttgaagttatccttcataacggcgcatgcagcccgggcgctcgccagggctgcatgaagagtatcgaagtcaagcacagcgccctcagcgtagagctccactccgacatggaggtgacggtcaatggccggctcgtttctgttccctatgttgggggcaacatggaggtcaatgtttacggcgctatcatgcacgaagtccgtttcaaccatctgggtcatatcttcactttcactccgcagaataacgaattccagctccaactgtcgccaaagacctttgccagcaagacctacggtctctgcggtatctgcgatgagaacggtgccaacgatttcatgttgcgtgatggtactgtcaccacagattggaagacactggtccaggagtggacggtccagcgacctgggcagacctgccagcccatccttgaagaacaatgtttagtacccgactccagtcactgccaggtcctattgctcccattgtttgctgagtgccacaaggtcctggcgcctgccaccttctacgcaatctgtcagcaggatagttgtcaccaggaacaagtctgcgaggtcatcgcttcatacgcccatctctgccgaacaaatggtgtgtgcgtagactggcgcaccccggacttttgcgccatgtcctgcccaccgagcttggtctataaccattgcgagcacggatgcccgagacattgtgacggaaacgtgtcctcttgcggggaccaccccagtgagggttgcttctgcccgcctgacaaggtaatgctcgaggggagctgtgtgcctgaggaagcctgcacccagtgcatcggtgaggacggtgtgcaacaccaatttctcgaggcatgggtccccgaccaccaaccctgtcaaatctgtacttgcctgagcggccgcaaagtcaattgtaccacccagccatgccctaccgcaaaggccccgacttgcggcctttgtgaggtcgcacggcttcgtcagaacgctgatcagtgctgcccggagtatgagtgcgtatgcgatcctgtttcctgtgacctgccccccgtcccacattgcgagcgcgggcttcagcccaccctcaccaaccccggtgagtgccgccccaatttcacttgcgcatgtaggaaagaggaatgcaagcgtgtttcccctccatcctgccccccccacagattacccaccctccggaagactcagtgctgtgacgagtacgagtgtgcctgcaactgcgtcaattccaccgtttcttgcccattgggttacctggctagtaccgctaccaacgactgtggttgtaccaccactacctgcctacccgacaaggtctgcgtgcaccgcagtaccatctaccctgtcggtcaattctgggaagagggttgcgatgtctgcacctgcactgacatggaggacgccgttatgggcctacgcgtcgcacagtgctctcaaaagccttgcgaagacagttgcaggtcgggattcacatacgtgttgcacgagggtgagtgttgcggccgctgcctgccctcggcttgtgaggtcgtcacgggtagccctcgaggtgatagccagtccagttggaaatcggtgggctcccagtgggcctccccagaaaacccctgcctgatcaacgagtgtgtgcgcgtcaaagaggaggtcttcatccaacagcgcaatgtctcctgcccacagctggaggttcccgtctgtccgtccggcttccaattgtcatgcaagacaagcgcttgttgcccttcctgccgttgcgaaaggatggaggcttgcatgctgaacggtactgttatcggtcccggcaagaccgtgatgatcgacgtgtgtactacgtgtaggtgcatggtacaagtgggtgtcatctccgggtttaagttggaatgccgtaagactacctgcaacccctgtcccctggggtacaaggaagaaaataacaccggtgagtgttgcgggcgctgtctgcccaccgcctgcaccatccagctccgaggcggccagatcatgacccttaagcgtgacgagaccctccaggacggctgcgacactcacttctgcaaagtcaacgagcgtggcgagtacttttgggagaagagggtgaccggttgtcccccttttgacgagcacaagtgcctggctgaagggggtaagatcatgaagatccccggcacctgttgcgacacatgtgaagagcccgagtgcaacgacattaccgcccgtctgcagtacgtcaaggtcggatcgtgcaagtcagaagtcgaggtggatattcattactgccagggaaagtgcgccagcaaggccatgtactcgattgacattaacgatgtccaagaccagtgctcgtgctgctcacccactcggacggagccaatgcaggtggcgctccattgcaccaacggctccgttgtctaccacgaggtgcttaacgcaatggagtgcaagtgctcgccccggaagtgcagcaag

SEQ ID NO: 21371 - DNA, 8439 bp, synthetic construct
  misc_feature 1..8439: note = source = /note="Description of Artificial Sequence: Synthetic coding sequence"
  source 1..8439: mol_type = other DNA
atgattcccgcacgatttgcgggtgtacttcttgccctggcactgattctcccggggacgctttgtgcagaaggaactagaggtcgctcgtcgacggcaagatgtagcctgtttggctcggatttcgtgaacacgtttgatggctcgatgtacagcttcgcaggatactgttcgtaccttctggcaggaggatgtcaaaaaagatcattctcgattattggggatttccaaaatggaaaacgtgtctccctgagtgtgtatcttggagagttttttgacattcaccttttcgtgaacggaaccgtgacgcagggagatcaacgggtgtcaatgccatacgcgtccaagggcctctacttggagactgaagcaggctattacaaactgtcgggggaagcgtacggattcgtcgcacgcatagacggttccgggaattttcaagtgctgctgtcggacagatactttaacaagacttgtggactttgtggtaatttcaacatctttgcggaagatgacttcatgactcaagaaggtactctcaccagcgatccttacgattttgctaactcgtgggcactttcctccggagaacaatggtgtgaacgagcaagccctccatcaagctcatgtaacatatcatcgggagaaatgcaaaagggcctttgggagcagtgtcaacttctgaagagcacttcagtattcgcacgctgtcatcctttggtggacccagagccttttgtcgccctgtgcgaaaagaccctctgtgaatgcgcaggtggtcttgagtgtgcctgtccagcactgcttgaatacgcgagaacgtgtgcacaggaaggaatggtgctgtacggttggaccgaccactccgcctgctccccggtgtgccccgcaggtatggagtacagacaatgcgtctccccatgtgcacgcacctgtcagtctctgcacataaatgaaatgtgtcaagagcgctgtgtcgacggttgttcttgtcctgaaggacagcttctggacgaaggtctttgcgtggaatcgaccgaatgtccttgtgtgcactcaggaaagaggtacccaccgggcacttcgctttccagggactgtaacacctgcatctgtagaaattcccaatggatatgtagtaacgaagaatgtcccggcgagtgccttgtgactgggcaatcgcactttaagagttttgacaaccggtactttacctttagcgggatctgccaataccttctggcccgcgattgccaagaccattcgttttccatcgtgattgaaacggtccagtgtgcagatgatcgcgacgccgtgtgtacgagaagtgtgactgtccgactccccggacttcataattcacttgttaaactgaagcatggggccggagtggccatggatggtcaagatgtccagctccctcttctcaaaggagatctgagaatacagcataccgtcaccgcgtcagtgcggctttcgtacggagaagatcttcagatggattgggacggcagaggtcggcttttggtgaaactttctcccgtgtacgccgggaaaacttgtgggttgtgtggcaactacaacggaaatcagggagatgattttcttacgccttcgggactggcagaaccaagagtggaagattttggtaatgcatggaagctgcatggagattgccaggatctgcaaaagcagcattcagacccgtgtgccctcaacccgcgcatgactagattcagtgaggaagcctgtgcagtccttacctcacctactttcgaggcatgccatagggcagtctccccacttccataccttcgcaattgtaggtacgacgtgtgttcgtgcagcgacggaagggagtgcctttgtggggcacttgcctcgtacgcagccgcctgtgccgggcgaggtgtgcgcgtagcctggagagagccaggcagatgcgagcttaattgtcccaagggacaggtctacctgcaatgcggaacgccttgtaatcttacctgtcgctcgctttcgtacccagacgaggaatgtaacgaagcatgtcttgagggttgtttttgcccacctggactctacatggatgaacgcggcgactgtgtgcccaaggcacagtgtccttgctactacgatggcgaaatctttcagcccgaggacattttcagcgaccatcataccatgtgttactgtgaagatgggtttatgcactgtaccatgtccggagtgccgggtagccttctccctgacgcagtgctgtcatccccgttgtcgcatagaagcaagcgttcgctcagctgtcgtcccccaatggtgaagctggtgtgcccggcggataatcttcgggcagaaggtcttgaatgtaccaaaacctgccaaaactacgacctggaatgtatgagcatggggtgcgtctccggttgcctttgtccccctggcatggtccgtcatgaaaaccgatgtgtggctcttgaacgctgtccatgttttcaccaaggcaaggagtacgcacctggagaaaccgtgaaaattggatgcaatacctgtgtgtgtcaggaccgcaagtggaattgtaccgatcacgtgtgcgacgcgacttgttctactatcggaatggcacattacctcacctttgacgggctcaagtatctgtttccaggtgaatgccagtacgtcctcgtgcaggattactgtggctcgaaccctggaacctttagaattcttgtcggtaacaagggctgttcccatccctcggtcaagtgcaaaaagagagtgaccattctcgtggaaggaggtgaaatcgaactgtttgacggagaagtaaatgtgaagaggcctatgaaggatgaaactcatttcgaggtggtggaatccggacggtacataattctcctcttgggtaaagccctttcagtggtgtgggaccggcacttgtcaatcagcgttgtactcaaacagacctaccaagagaaagtgtgtggtctgtgtggaaactttgatgggatccaaaacaacgacctgacctcaagcaacctgcaagtcgaggaggatcccgtggactttggcaactcgtggaaagtatcgtcccagtgtgccgatactagaaaggtgccacttgatagctcaccagcaacttgccataacaacatcatgaaacaaactatggtggatagcagctgtcgaatcttgacctcagatgtgtttcaagactgtaataagttggtggatcctgagccatatcttgatgtgtgtatctacgatacctgctcttgtgagagcatcggggactgtgcatgcttttgcgataccattgcagcttacgcgcatgtgtgtgcccaacatggcaaagttgtgacgtggaggaccgcaaccctgtgccctcaatcctgtgaggaacgcaaccttagggaaaatggatatgaatgtgaatggagatacaactcgtgtgcacctgcatgtcaagtgacctgtcagcatccagagccactggcctgcccagtccaatgtgtggaaggctgtcacgcacattgtccccccggcaagattctggacgagctgcttcaaacctgcgtggatcctgaagattgccctgtgtgtgaggtcgctggaaggcggtttgcctccggcaagaaggtgaccctcaatccttcagaccctgaacattgtcagatctgtcactgtgatgtggtgaatctgacttgcgaggcttgccaagagcccggcggactcgtcgtcccacctactgatgcaccagtcagcccaacgaccttgtacgttgaggacatttccgagccgcctctgcatgatttctactgctcaagactgctggacctcgtctttctgctcgatgggtcctcgagactgtccgaagcggaatttgaggtgctcaaggcttttgtcgtcgatatgatggagagattgcgtatcagccagaagtgggtccgcgtggccgtggtggaataccacgatggctcccacgcctacattgggctgaaggaccggaagcggccctccgagctccgtcgcatcgcttcgcaggtgaagtacgcgggatcccaagtcgcaagcacttctgaagtgctgaagtacacccttttccagattttcagtaagattgaccgccctgaagcaagccgtattactctgttgctgatggcatcccaagagccacaaaggatgagccgtaatttcgtccgatacgtgcaaggcctgaaaaagaagaaggtgatcgtgattcctgtcggaatagggccgcacgcaaacctgaagcagattcgcctgattgaaaagcaagctcctgaaaacaaggcatttgtgctgtcgtcagtggatgaacttgagcagcagagagatgaaatcgtctcgtatctctgtgatctggcgcctgaggcgcctcctccgacccttccccccgacatggcccaggtcaccgtgggacccggactcctgggggtgtcgactctcggtccgaagagaaactcgatggtcctggatgtggcgtttgtgcttgaaggttccgacaagatcggtgaagcagactttaaccggtcgaaggaattcatggaagaggtgatccagcgaatggacgtcggtcaggattcaattcatgttactgtgctgcagtacagctatatggtgaccgtggaataccccttttcggaagcacagtccaagggcgatattctgcagcgggtgcgcgaaatcagataccaagggggaaatcggaccaatactgggcttgctcttcgctacctttcggatcatagctttcttgtttcccaaggcgatagagagcaagctcccaaccttgtgtatatggttacgggtaaccccgcatcagatgagataaagcgcctgccaggtgatattcaagtcgtgccgattggagtgggacccaacgcaaacgtgcaggaacttgaacgtatcggatggccaaatgcgccgatattgattcaagacttcgaaactcttccaagagaggcaccggacctggtcctgcaacgctgttgtagcggcgaggggctgcaaattcccaccctttctcctgctcccgattgtagccagcctctcgatgtgatcctgctgctcgatggctcatccagctttcccgcaagttactttgatgaaatgaagtccttcgcgaaagcgtttatctctaaagctaacattggtccacggctcactcaggttagtgtcctccaatacggatcgattaccactattgacgtgccttggaacgtggtccctgaaaaggcccacctgctttcgctggtggatgtcatgcaacgggaaggaggtccatcccaaataggtgatgcacttggttttgcagtgcggtacctcacgtcggaaatgcatggtgcgcgaccaggagcctccaaggcagtggtgattctggtcaccgatgtgagcgtggatagcgttgatgccgctgcagatgctgcaagatcgaatagagtcactgtgttcccaataggcattggggataggtacgatgcagcacagctgcggattctggcaggacctgcaggagactccaacgtggtgaaacttcagcgcattgaggatttgcccactatggtgaccctgggaaacagctttctccacaaactgtgcagcgggttcgtgcggatctgtatggatgaggacgggaatgagaaacggcctggtgatgtgtggaccctccctgaccagtgtcatactgtgacctgtcaaccagatggacaaaccctcttgaaatcccaccgtgtcaattgtgatcggggcctcaggccttcctgtcctaactcccaaagccccgtcaaggtcgaagaaacgtgcggatgccgatggacctgtccatgtgtttgtaccggatcatcgactaggcacatcgtgacgttcgacggacaaaacttcaaacttaccggaagctgttcctacgtgctttttcaaaacaaggaacaagatttggaagtgattctgcataatggagcctgctcccccggtgcacggcagggctgcatgaagtccatcgaagtcaaacattcggcacttagcgtggaactccatagcgatatggaggtgaccgtgaatggacgactcgtgtccgtgccttacgttggtggaaatatggaagttaatgtgtacggagcaatcatgcatgaagtgagattcaatcacctgggccatatctttactttcacccctcaaaacaacgaatttcagctgcagctctcacctaagactttcgcaagtaagacctacggactctgtggtatttgtgacgagaatggggcaaatgactttatgctgagagatggaaccgtgactactgactggaaaaccctcgtccaagagtggactgtgcaacgtcccggacagacctgccagcctattctcgaagaacagtgccttgtgccggactcgtcccattgccaggtgctccttctgccattgttcgcagagtgccacaaggtgctcgcccctgccaccttttacgccatttgtcagcaagattcatgtcatcaagaacaagtgtgcgaagtaattgcgtcatacgcgcacctttgtcgtactaacggtgtctgcgtggattggcgaactccagacttctgtgcaatgtcatgtccaccctcactggtctacaaccattgtgagcatgggtgccctagacactgcgatggaaatgtgtcgtcgtgtggtgatcacccttccgaagggtgtttttgtcctccggataaagtgatgctcgaaggttcatgtgtgccagaagaggcatgcactcaatgcattggtgaggatggggtgcagcaccaattcctggaagcctgggtcccagatcaccaaccatgtcaaatttgtacctgcctgtcaggtaggaaggtcaactgcactacgcaaccttgtcctactgcaaaagcacctacctgtggtctttgcgaagtggcaaggctccgacagaacgcagatcaatgttgtcctgaatacgagtgcgtgtgcgaccctgtttcctgtgacctgccaccagtcccacactgtgaaagaggccttcaacctactctgactaacccaggcgagtgcaggcctaacttcacttgcgcctgtcggaaggaagaatgcaaacgtgtctcacctccgtcctgcccacctcatagactgccaaccttgagaaagacccaatgttgtgatgaatatgaatgtgcctgcaactgcgtcaattctactgtctcttgtcccctgggctaccttgccagcaccgctactaacgattgtggttgcactaccactacttgcttgcccgataaggtgtgtgtgcataggtcaactatatacccagtgggacaattttgggaggagggatgtgatgtgtgtacgtgtactgatatggaagatgcagttatgggacttagagtggcgcagtgctcgcaaaagccgtgcgaagattcctgccggtccggtttcacctacgtgctgcatgaaggagagtgttgcgggagatgcctgcctagcgcatgtgaggtggtgaccggttcgcccagaggagattcgcaatcatcctggaaaagtgtgggttcgcaatgggcaagcccggaaaacccatgcctgatcaatgaatgtgtccgtgttaaggaggaagtctttatccagcagaggaacgtgagctgtccacagctggaagttcccgtttgcccgtcgggattccaactgtcctgtaaaacctcggcgtgttgcccttcgtgccgttgtgagcggatggaggcgtgcatgctcaacggaacggtgattggcccaggaaagaccgtcatgattgacgtctgtactacctgcagatgtatggtgcaggtgggtgtgatatcgggatttaagttggaatgtagaaaaaccacttgtaacccatgtcctctggggtacaaggaagagaataacacgggtgaatgttgcggccgctgcctgcctactgcttgtactatccaactgcggggaggccagattatgaccctcaagcgggacgaaaccctgcaggatggttgcgatacccatttttgcaaggtgaacgaaaggggagagtacttctgggagaagagagtgacggggtgtcctccttttgacgagcataagtgccttgccgaaggagggaagatcatgaaaatccctggaacctgctgtgacacttgcgaagaacccgagtgtaacgatattactgcgcgactccaatacgtcaaggtgggctcctgtaagagcgaggtcgaagtagacatccattactgccagggaaagtgcgcttccaaggcaatgtacagcattgatatcaacgacgtgcaggaccagtgctcctgctgtagcccaactcggaccgagcctatgcaggtagcactgcattgtactaacggaagcgttgtctatcacgaagtgctcaacgcaatggagtgtaagtgctcaccaaggaagtgttccaag

SEQ ID NO: 21372 - DNA, 8439 bp, synthetic construct
  misc_feature 1..8439: note = source = /note="Description of Artificial Sequence: Synthetic coding sequence"
  source 1..8439: mol_type = other DNA
atgatccccgctcgattcgccggggtgctcctggccctggcacttatcttaccagggaccctctgtgccgagggtacgagaggcagaagctcaaccgcacggtgttctctctttggatcggattttgtcaacacttttgatggatccatgtactcgtttgcgggatactgcagctacctgctggccgggggatgccagaaacgctcattttctataataggtgatttccagaatgggaaaagggtatctcttagtgtgtacctgggggagttttttgatattcatctcttcgtcaacgggacagtcactcagggtgatcagcgagtgtcgatgccgtatgcctccaaaggcctctaccttgaaactgaggcgggttactacaagttgtcaggagaggcgtatggcttcgtggccagaatagacgggtccggcaactttcaggtcctcttgagcgaccggtattttaataaaacatgcggactgtgcgggaattttaatattttcgcggaagatgatttcatgacccaggaaggtacactcacctcagacccgtacgatttcgctaacagctgggctctcagcagcggagagcagtggtgtgagagagcatctcccccaagctcaagctgtaatatttccagcggggagatgcagaaaggcctctgggaacagtgtcagctacttaagagtacctcagtgtttgcgaggtgtcatccattagtggacccggaaccattcgttgccctttgtgaaaaaactctttgtgaatgtgcagggggactcgaatgcgcctgcccagccctcctggagtatgcgagaacatgcgcacaggaggggatggtgctgtatggttggactgatcatagtgcttgcagcccagtatgccccgctggaatggaatatcgccagtgcgtttctccctgcgccaggacgtgccagagtctacatatcaacgagatgtgtcaggagagatgtgttgacgggtgctcttgtcccgaagggcagcttcttgatgaggggctgtgcgtagagtccacagagtgtccgtgtgtccactctgggaagaggtacccccccggaactagtctgtctagggactgcaatacctgcatatgtagaaattcacagtggatctgcagtaacgaagagtgcccaggtgaatgccttgtgacaggacagtcccatttcaagagcttcgacaaccgttactttaccttctctggaatttgccaatacctgcttgcccgggattgccaggaccattcattcagtatagtgatcgagactgtgcaatgtgccgatgaccgggatgccgtttgtacacgcagcgtaacagtaaggctcccaggtctgcataactcattggtgaaacttaaacacggcgccggcgtggcaatggacggacaggacgtccaactgccactacttaaaggcgatcttaggatccagcacacagtaactgccagtgtgcgtttgtcttacggcgaggacctccagatggactgggacggcaggggtcggttgttagtgaaacttagcccagtatatgctgggaagacttgtggcctgtgcggaaactataatgggaaccagggcgatgacttcctcacgcctagcggactggccgaaccaagggtcgaagactttggcaacgcttggaagctgcacggagattgccaggatctgcagaagcagcattctgacccttgcgcactgaacccccgcatgacacgtttctccgaggaggcatgtgccgtgctcacctcccccaccttcgaggcctgtcaccgcgccgtgtctccactaccttatctgcgaaactgtcgatatgatgtgtgcagctgcagtgacgggagggaatgtctgtgtggagcgctcgcgagttatgcagcagcttgcgccggcaggggagtccgagtggcctggcgagagcctggacgttgtgagctgaactgtccgaaggggcaggtctacctgcaatgtggaaccccatgcaacttgacatgtcggtcactgtcttaccccgacgaggagtgcaatgaagcctgtctcgagggctgcttctgtccccccggactttacatggatgaacgcggcgactgcgttcctaaggcccaatgtccctgctattacgatggtgagattttccagcctgaagacatattctctgatcaccacacaatgtgttattgcgaggatgggtttatgcactgcaccatgtcgggcgtgcctgggtcactgctccccgacgcggtcctttctagtcccctcagccataggagcaagagaagcctctcatgtaggcctcccatggtcaagcttgtttgtcccgcggacaatctgcgggctgagggactagaatgcacaaagacatgccagaactatgatctcgaatgtatgtctatgggctgcgtttctggatgcctctgtccacccggtatggtgcgacatgagaatcgttgcgtagcattggaacgctgtccctgctttcaccagggcaaggaatacgcccctggtgaaaccgtgaagatcggctgtaacacttgcgtgtgccaagacaggaaatggaattgcacggatcatgtctgcgatgcaacctgttctacgatcggcatggcccactatttgactttcgacgggctgaagtacctttttccaggtgagtgccagtatgtcctcgtccaggattactgtggaagtaaccctggcacgttccgtatcttggtcgggaacaaaggctgctcccacccgtccgtgaaatgcaaaaagagggtgactatcctggtggagggcggcgagatcgagttgttcgacggggaagtcaacgtaaagagacccatgaaggatgagacacattttgaggtggttgagtctggccggtacatcatcttactgttagggaaggcactaagtgtggtgtgggaccgacatctctccatttccgtcgtgctaaagcagacctaccaagagaaagtgtgcgggctttgtggaaactttgacgggatacaaaataatgatcttacaagttctaatctgcaggtggaagaagaccctgtcgactttggcaattcgtggaaggtaagctctcagtgtgccgatacacgcaaggtgccattagactcctcgcctgcaacttgccataataatattatgaagcagaccatggttgattcaagctgtagaatacttacgtccgacgttttccaggattgtaacaagttggtggaccccgagccctaccttgatgtctgtatctacgatacatgttcttgtgaatcaatcggtgactgcgcctgcttctgtgatactatcgcagcatatgcacacgtctgtgcacagcatggtaaggtggtcacgtggagaactgccaccttgtgcccccaatcttgtgaggagcgaaacctgagagagaatgggtatgagtgcgagtggcggtataactcttgcgcacccgcctgccaggtgacatgccagcatccagagcccctcgcatgcccggttcagtgcgtagagggctgtcacgctcattgtccacccgggaagatcctggatgagctgctgcagacctgcgtggacccggaagattgccctgtttgcgaggtggctgggcgtaggtttgcctctggtaagaaggtcacccttaaccccagtgacccagagcactgtcagatctgtcattgcgacgtggtgaatttaacatgcgaagcctgtcaagagcccggcggcctggtggttccgcccactgatgcacctgtatctccaaccaccctatacgtggaggatatcagcgaacctccactgcacgacttctattgctcccggcttttggatctggtgtttctcctggacgggtccagccggttgtccgaggcagagtttgaagttctaaaagccttcgtcgtggatatgatggaacgactgcggataagccaaaagtgggtccgggtggccgttgtggaataccacgatgggagtcacgcttacataggtctcaaagacaggaagagaccatctgagctgaggcgaattgctagccaggtcaagtacgctggctcacaagtggctagcacatccgaggtgctgaagtatacgctcttccagattttttctaaaattgatcgaccggaggcgagccggattacacttctactgatggctagccaagagccccagagaatgtcaagaaactttgtccggtacgttcaggggctgaaaaagaaaaaagttattgtgataccagttgggattggcccccacgcaaatctaaagcaaataaggctcatcgaaaaacaggccccagagaacaaagcgttcgttctgtcatccgtggatgaattggaacagcagcgggatgagatcgttagctacctctgtgatctggccccagaggcaccaccacccacgctcccccctgacatggcccaagtgaccgtgggtcctggcttgctgggggtttcaacactcggacccaagcggaactccatggtcctagacgtggcgttcgtccttgaagggtccgacaaaatcggcgaagccgacttcaacagaagcaaagagtttatggaggaggtaattcagagaatggatgttgggcaggattcaatccacgtgacggtgttacagtattcctacatggtgactgtagaatatccttttagtgaagcccagagtaagggagatattcttcagagggtgcgtgagatccggtaccaaggcgggaacaggacaaatacagggctcgcattaaggtatctgagtgatcattctttcctggtgtcccagggagatagagaacaggcgccaaacttggtgtatatggtcactggtaaccccgctagcgacgaaatcaaacggctcccgggtgatatacaggtggtcccaatcggtgttgggcctaatgctaatgttcaggaattggagagaattggctggccgaacgcccccattctgatacaggatttcgagactttacccagggaggcccccgatttagtccttcagcggtgttgtagcggcgagggactgcagatccctaccctctcgcctgctccagactgctcacagccgttagacgttattctccttttggatggcagtagttcatttcccgctagctattttgatgagatgaaatccttcgctaaagcctttattagcaaggcaaacataggcccccggctgacccaggtaagcgtgttgcagtacggcagcataacaaccatagatgtcccttggaatgtggtccctgaaaaggcgcatctgctatcactggtagacgtgatgcaacgggagggagggccctcacagatcggggacgccctgggatttgcggttcgctacttaaccagcgaaatgcatggagctcggccaggggcgagcaaggctgtagttattcttgtgactgatgtgagcgtggatagcgtggacgccgcggcagacgccgcccgaagcaatcgggtgaccgtgttcccgattggcatcggggaccgctacgacgcagcccagttaaggatcttagcaggcccagcaggtgactcaaacgtcgtaaaattacagcgtatagaagacctgcctacaatggtgacattaggcaattcatttctgcataagctgtgttccggcttcgtgagaatttgcatggatgaagatggcaacgagaaaagacctggagacgtgtggactctgcccgaccagtgccacacagttacttgtcagcctgacggccagactctcctgaagagtcatagagttaattgcgaccgagggctccgccctagttgccccaatagccagagcccagtcaaggtggaggagacttgtggatgcaggtggacctgtccgtgcgtgtgcacaggcagttcaacccgccatatagttaccttcgatggacagaacttcaagctgaccggctcatgctcctacgtactgtttcagaataaagagcaggacctggaggtgattctacataatggggcctgctcgcccggagctaggcaggggtgtatgaagtctatagaagtcaagcactcagcactctccgttgagttacattcggacatggaagttacggtgaatggacggctggtcagtgtgccctatgtgggggggaatatggaggtgaatgtgtacggggccataatgcatgaggtccgtttcaaccacctgggtcatatattcacattcacacctcaaaataatgaatttcagcttcaattatccccaaagaccttcgcctccaagacttacggcctatgcggcatttgtgacgaaaacggtgccaatgactttatgttgagagacggcactgtaacaacggattggaaaacacttgttcaggagtggacggtgcagcgccccggtcagacctgccaaccaatccttgaggagcagtgtttagtgcctgactcatcacactgccaggtgctcctgctccctctgtttgcggagtgtcacaaagtcttggctcccgcaactttctacgctatatgccagcaagattcatgtcaccaggaacaagtgtgcgaggtgatagcatcctatgcccatttgtgcaggacaaacggcgtatgcgtcgactggaggacaccagatttttgtgccatgagttgcccccctagtctcgtttacaaccactgcgagcatggttgcccgagacactgcgatggaaacgtatctagttgcggagaccatccctcagaaggctgtttctgtccgcccgacaaggtaatgctagaggggtcctgcgtgcctgaggaggcctgcacacaatgcattggagaggatggggtgcaacatcagtttctggaggcatgggtccccgatcaccagccctgccaaatctgtacctgtctgagcggtcggaaggtgaactgcacaacacagccttgtcccaccgccaaggcgcctacttgtggtttgtgtgaggtcgctcggctgcgccagaatgcggaccagtgttgtcccgaatacgaatgcgtctgtgatcctgtgtcctgtgatctcccacccgttccacactgcgagcgaggtctgcagccaaccctcaccaaccccggagagtgtcgacccaactttacctgcgcctgtcgtaaagaggaatgtaagagagtgtcccccccatcttgtccccctcacagacttcctactctgcgaaagactcagtgctgcgatgagtatgagtgtgcctgcaattgcgtaaacagcaccgtgagctgcccgctgggatacctggcatcgacagcaaccaatgattgcggctgcacaaccaccacgtgcttacctgacaaagtttgcgttcataggtccactatttaccccgtcggccagttttgggaggaaggatgcgatgtatgcacatgcactgacatggaggacgctgtcatggggctgcgagtggctcagtgctcccagaaaccctgtgaggactcatgccggtctggcttcacttatgtgctccacgaaggcgagtgttgcggtagatgtttgccctctgcttgtgaagtagtgacaggctccccacgaggagatagtcagtcatcatggaagtcggtgggctcccagtgggccagtcccgaaaatccatgcctgatcaatgagtgcgtccgcgtgaaagaggaagttttcatccaacaaagaaatgtatcctgcccccagttagaggtccctgtctgcccatccggatttcagctgagctgcaagacctccgcctgctgcccaagctgccggtgtgagcggatggaggcttgtatgttgaacggtaccgtgatcggacccgggaagactgtcatgattgacgtctgcactacttgccgatgcatggtgcaggtcggagtgatatcaggttttaagcttgaatgccgcaagactacatgcaacccttgtcccctggggtacaaggaggagaacaataccggcgagtgttgtgggcggtgtttgcctaccgcatgtaccattcaactccgtggcgggcaaatcatgaccctgaaaagagacgagaccctgcaagacggatgcgatacccacttttgtaaagtaaacgaacggggggagtacttctgggaaaaaagggttactggctgcccgccctttgatgaacacaaatgcctggcagaagggggaaagatcatgaagatcccaggtacatgctgcgacacctgcgaagagcccgagtgtaacgatattaccgctcgacttcaatatgtgaaggtggggtcctgtaagtctgaggttgaagtggacatccactactgccagggaaagtgtgcatcaaaagctatgtattccattgacattaacgacgtgcaagaccagtgctcttgttgcagtcccacgagaacagaacccatgcaggtggccctccattgtactaacggatccgtcgtctaccacgaggtgctcaacgccatggagtgtaagtgctccccacggaagtgttccaaa

SEQ ID NO: 21373 - DNA, 8439 bp, synthetic construct
  misc_feature 1..8439: note = source = /note="Description of Artificial Sequence: Synthetic coding sequence"
  source 1..8439: mol_type = other DNA
atgattcctgctcgttttgccggtgttctgctagccctggcactgattttacccggcacactctgtgcagaagggacacgcggcagatcgagcactgcccgatgtagcctgtttggctcagattttgttaacacgtttgacggcagtatgtacagcttcgcaggctattgttcctacctgctggcgggggggtgtcaaaagcgatccttttccatcatcggagactttcagaacggcaaacgcgtcagcctcagcgtttacctgggcgagttcttcgacatccacctattcgttaatggcacggtcacccagggtgatcagcgggtctccatgccatacgcctcgaagggcctgtatcttgagaccgaagccggctattataaactgtccggcgaggcctatgggtttgtcgcacgcattgacggcagtggcaactttcaagtccttctgagcgaccgctatttcaacaaaacctgtggattatgtggtaatttcaacatctttgctgaggatgattttatgacccaggagggtacgctgacctcggatccgtatgatttcgcaaattcctgggctctctcttctggagagcagtggtgcgaaagagccagcccaccatcgagtagttgcaatatttcgtccggagaaatgcagaaaggcctgtgggaacaatgccaactgctgaagagtacatcagtgtttgccagatgtcacccactcgttgacccggaaccttttgtggctctatgtgaaaagacgttatgtgagtgtgccggaggactcgaatgcgcatgccccgctctcctcgaatatgccagaacgtgtgcccaggagggaatggtgttgtatggctggacagaccatagtgcctgctctccggtatgccccgccggcatggaatacaggcagtgcgtgtccccctgcgcacggacatgtcagagcctgcacataaacgaaatgtgtcaggagcgatgcgtggacggctgttcatgtccagaaggacagctcctggacgagggtttgtgtgtcgaatcaaccgaatgcccatgcgtgcattcaggcaagagatatcccccagggacgagtctgtcccgggactgcaacacctgtatttgtagaaactcacagtggatctgcagcaacgaggagtgccctggtgaatgtctggtgaccggtcaaagtcatttcaagtctttcgacaatcggtacttcactttttccggaatttgtcagtatctcctagcccgagactgccaggaccatagcttctctatagtgattgaaacagttcagtgcgcagacgatcgcgatgcggtatgtacgaggagcgtcactgtcagactgcccggcctgcacaactcactagtcaaacttaagcatggggccggcgtcgctatggacggacaggatgtacagctccccctgctgaaaggtgatctgcgcatccagcatacggtgacggcttccgtgaggctctcctatggggaagaccttcagatggactgggacggtcgggggcgactgctcgtgaagctgtcacccgtgtacgcgggaaaaacttgcggactttgtggtaattacaatggcaaccaaggtgacgatttccttaccccctctgggttggctgagcctagggtcgaggatttcgggaatgcctggaaacttcacggcgattgccaggacctgcagaagcagcactctgacccctgtgccctaaatccccgaatgacccgattctcagaagaagcctgtgctgttcttacgagtccaaccttcgaggcgtgccatcgggccgtaagccccctgccatatctgagaaattgccgatatgacgtttgcagctgtagcgacgggagggagtgcctctgcggagccctggcttcctacgctgccgcatgcgctggacgcggggtacgcgttgcttggcgcgagcccggtcggtgtgaattaaactgtcccaaaggtcaggtttacctccagtgtgggacaccgtgtaacctgacgtgtcggagtctcagctatcctgatgaggagtgtaatgaggcctgcctggagggctgcttttgccctccaggcctgtatatggatgagcggggagattgtgtgccaaaagcacaatgcccctgttattacgacggtgagatcttccaaccggaggacatattttccgatcaccacaccatgtgctactgtgaagatggcttcatgcactgcacgatgtcaggcgtgcctgggtccttgttaccagacgccgttctgtcctcccctttgagtcataggtcgaagcggtctctgagttgcaggccaccaatggttaagttagtgtgtcccgcggataacctgagggcagaaggactggagtgcaccaagacgtgtcagaactatgatctagagtgtatgtcaatgggctgtgtgagcggttgtctctgccccccaggcatggtgcggcacgagaataggtgcgtggccctggaacgatgtccctgctttcatcaaggcaaagaatacgctccaggtgaaaccgtaaagataggatgcaatacctgtgtctgtcaagatcgaaagtggaattgcactgatcacgtgtgtgatgcaacatgctccacaatcggcatggctcactatttgaccttcgacggcctgaaatacctgttccctggggagtgtcagtatgtcctggtgcaggactactgcggatccaaccccgggactttccggatcctagtgggtaataagggctgctctcaccccagcgttaagtgcaagaaaagagtcaccattcttgtggaaggcggcgagatcgagctcttcgacggtgaggtcaacgttaaaaggccaatgaaggatgagacccatttcgaagtggtagagagcggccgatatatcatcctcctgctcgggaaggctttgtccgtggtctgggatcgccacttgtctatatccgtggttttaaaacagacttatcaagaaaaagtgtgcggcctatgtggaaatttcgacggtatacagaataacgacctaacatctagtaacctgcaggtcgaagaggatccggtggatttcggcaactcctggaaagtttccagtcagtgtgcagacactcgaaaggtacctctcgatagttctccagcaacatgtcataataatatcatgaaacagaccatggtggatagctcttgcagaattcttacctcagatgtgtttcaggactgtaataagttggtggatccggaaccttacctagatgtgtgtatttacgacacgtgttcctgcgaatctatcggggactgtgcctgcttctgcgacacgatcgccgcatatgcacacgtgtgcgcccagcatgggaaggtcgtgacctggagaacagccacactgtgtcctcagagttgcgaggaaaggaacttacgtgaaaatgggtacgaatgcgaatggcgctacaacagctgcgctccggcatgtcaagtcacctgtcagcaccccgagcccttagcttgccctgtgcagtgcgtcgaagggtgccacgcgcactgccccccaggtaaaatcttggatgagcttctgcagacctgcgtcgaccctgaagactgtccagtctgcgaagtggcggggcgacgcttcgcctccggaaagaaagtcacacttaaccccagcgatccggagcactgccaaatctgccactgcgacgtggtcaacctaacatgcgaagcttgccaagaaccaggcgggttggtggtgcctcccacagatgccccggtatccccaactacgctgtacgtcgaggatatctctgagccaccacttcacgacttttattgcagtaggctgctggatctggtgttcctgctcgatggaagttctcgactctctgaagccgagtttgaggttctgaaagcattcgtggtggacatgatggaaaggctgcggatctcacaaaagtgggtaagggtcgcggtggtcgagtaccatgatggctcccatgcctatatcggcctgaaagacagaaagaggccatcagagctaagacgaatcgccagtcaggtgaagtacgccgggtctcaggtggcttcaacgtccgaggttttaaaatatacactgttccagattttttcaaagatcgatcgaccagaggcttctaggatcacccttctattgatggccagtcaagagccgcaacggatgtccagaaatttcgtccggtatgtgcagggtcttaaaaagaagaaggtgatagtcatcccagtaggcatagggccccacgccaatctcaaacagatcagactaatagagaagcaagccccggagaataaagcctttgtgctgtctagcgtggatgagttggagcaacagcgcgacgaaatagtctcctatctgtgcgaccttgcaccagaagcgccaccccctactctgccgcccgatatggcacaggtaacggtcggtcccggtctgttaggcgtgtccacgcttgggccaaagcgcaatagtatggtgcttgatgtggcgttcgtcctcgagggcagcgataaaattggggaagccgattttaaccggtcaaaggagtttatggaagaagttatacagcgaatggacgtcggccaggactccatacatgtcacagtgctacaatacagttacatggtgaccgtcgagtacccattctccgaggcccaaagcaagggcgacatcctgcagcgggtgagggagatcagatatcagggtggaaatagaacgaatactggactggctctgcggtatctttcagaccattcttttttggtgtcccagggcgatagggaacaagctcccaacctggtttacatggtgacaggcaatcccgcatcggacgaaattaagagattgcctggggatatccaggttgtcccgatcggagtcggaccaaatgctaacgtccaggaactggagaggataggatggccaaacgcccccatcttaattcaggactttgaaactctgccccgggaggctccagaccttgtgctgcagaggtgctgttcgggcgaaggcttgcaaattccaacactctccccagcccccgactgttcccagccattggatgtgatcctgcttctggacgggtcctcttcattccccgcctcctacttcgatgaaatgaagtcatttgcgaaggcctttatctccaaagcaaacataggccctaggttaactcaggtttcagtgctgcaatacggatctatcacaacaatcgacgtgccttggaacgtggtgcccgagaaggctcacttgctaagcctcgtagatgtcatgcagcgggaggggggtccgtctcaaatcggcgatgcccttggcttcgcagtgcgctacctcacctctgaaatgcatggggcccgcccaggagccagcaaagcagtggtgatcctagtcaccgacgtgagcgtcgactccgtagacgcagccgctgatgcggctcgcagcaatcgtgttaccgtgtttcctatcgggatcggagataggtacgacgccgcccagttgagaatcctggccggccccgccggggacagcaatgtggtcaagctgcaacgcatcgaagacctgcccacaatggtaactcttgggaatagctttttgcacaagctatgctccggatttgtgcgtatctgcatggatgaagatgggaacgagaaaaggcctggtgatgtgtggacacttccagaccagtgccatacagtaacctgtcaacctgacggccaaacactgctgaagtcccatcgagtaaactgtgatcggggccttcgaccctcatgtccaaactcacaaagtcctgtgaaagtggaagagacctgcggctgtagatggacatgcccttgtgtgtgcactggcagtagtactcgacacatcgtcacgtttgatgggcagaatttcaagctgactggctcttgcagctacgtgttattccaaaacaaggaacaggacctcgaagtgatactccacaatggagcgtgctcacctggagcccgccaaggctgtatgaagagtatagaggtcaagcacagcgccttgagtgttgagctccattcagatatggaggttacagtgaatggcaggttggtgtcggtcccctacgtggggggcaatatggaggtcaacgtttatggcgccatcatgcatgaggttagatttaaccacctggggcacatcttcacattcaccccgcagaataatgagttccagttgcagctgtctccgaagactttcgccagcaaaacgtatggtctttgtggaatctgcgacgagaacggcgcaaacgacttcatgctgagagacggcacagtgacgaccgattggaaaacgttagtgcaagaatggaccgtccaaaggccgggccagacttgccaacctattctggaggaacagtgtttggttccagattcaagccattgccaggttctccttctcccgcttttcgctgagtgtcacaaggtgttagctccagcgaccttttatgcaatatgtcagcaagactcgtgtcaccaggagcaggtctgtgaagtgattgctagttatgctcacctgtgccgaactaacggagtgtgcgttgattggcggacccctgatttttgtgcaatgtcctgccctccgagcttggtctataaccactgcgagcacggatgcccccggcattgcgacggaaatgtgtcctcgtgcggcgaccacccaagtgaaggatgcttctgcccgcctgataaagtcatgttagaggggtcctgtgtgcctgaagaggcgtgcacccagtgtattggcgaagacggggtgcagcatcagttcttagaggcatgggtgcccgaccaccagccttgtcagatctgtacttgccttagtggaaggaaagtaaattgcacaactcagccgtgcccaacagctaaagcaccgacctgtgggttgtgtgaggtggcccggcttcggcagaacgcagaccagtgctgtcctgagtacgaatgcgtatgtgaccccgtgtcttgcgacctcccccccgttcctcattgtgaaaggggcttgcagccaaccctcactaatccgggcgagtgccggcccaatttcacctgcgcctgtcgcaaagaggaatgtaagagagtttccccgccaagttgcccaccccaccgcttacctacactgaggaaaacccagtgttgcgatgaatacgaatgcgcatgcaactgcgtgaactccaccgttagctgtccgctgggctatctggcatccactgccaccaacgattgcgggtgtacaaccactacgtgcttgcccgacaaagtgtgtgtgcacagatccactatctacccagtgggccagttttgggaggaggggtgcgatgtatgcacctgtacagatatggaagatgctgtgatgggacttagagtcgcccagtgttctcagaagccctgtgaggactcatgtcggagcggatttacctacgtactgcacgagggtgaatgttgtgggagatgtctgcccagcgcttgtgaggtagtcaccggctcacctcggggcgatagccaatccagctggaagtcagttggatcccaatgggcatcacccgagaacccctgcttaattaatgagtgtgtcagggtgaaggaggaggtgtttatccaacaaaggaacgttagctgccctcagctcgaggtcccagtttgccctagtggcttccaactcagctgtaagacgagtgcttgctgtccttcctgtcgttgtgagagaatggaggcatgtatgttgaacggcacagtgatagggccaggcaaaaccgttatgattgacgtctgcacaacatgcaggtgcatggtgcaggtcggggtgataagtggtttcaaattggaatgtcggaagactacctgtaacccttgcccgcttggttataaggaggaaaacaatacaggcgagtgttgtggacggtgtttacctacagcttgcacaatccagctgcgaggtggacaaattatgaccctgaaaagagatgagaccttgcaggatggctgtgacacccacttctgcaaagtcaatgagcgaggggagtatttctgggagaagagggtgactgggtgtccccctttcgacgagcataagtgcctggcagagggcggcaagatcatgaaaatacctgggacctgctgcgacacgtgcgaggaaccagaatgcaacgacataactgcaagactgcagtacgtaaaggtagggtcttgtaagtccgaagtggaggtggatatccattactgtcagggcaagtgtgctagcaaagccatgtattccatagatataaatgatgtacaggaccagtgcagttgctgcagcccaaccaggacagaacctatgcaggttgcactgcactgcacgaacgggtccgtcgtgtaccatgaagtgcttaatgcgatggagtgtaagtgctcaccccgaaaatgttcgaag

SEQ ID NO: 21374 - DNA, 8439 bp, synthetic construct
  misc_feature 1..8439: note = source = /note="Description of Artificial Sequence: Synthetic coding sequence"
  source 1..8439: mol_type = other DNA
atgatacctgcgcggttcgctggggtgctgcttgcactggcactgatacttccaggcacactttgtgcagaaggaacgcggggtaggtcctctacagctagatgctccctttttggttctgacttcgtaaacacctttgatgggagtatgtactcatttgccgggtactgcagctacctcttggccggtggctgtcagaagcgatcgttctcgatcatcggggatttccaaaacgggaagagggtgtccttgagcgtttatctcggcgagtttttcgatattcacctgtttgtgaatggcactgttacccagggcgaccaacgtgtgtctatgccatacgcatcaaagggtctatatctagagacagaggctggatactataaactgtctggcgaagcctatggattcgtagcccgcattgatgggtctgggaatttccaggtgttgctgtcggatcggtactttaacaagacttgtggcctctgtggtaacttcaatattttcgctgaagacgattttatgacgcaggagggaactcttacatcagacccatacgatttcgccaattcttgggctctttcctcaggcgaacagtggtgcgaaagagcatctcctccctcctccagctgtaatatctccagcggcgagatgcagaagggcttatgggaacagtgccagttactgaagtccaccagcgtctttgccagatgtcatcccttggtggatcccgagcccttcgtagcgctgtgtgagaagacgctttgcgagtgtgccggggggttagagtgcgcttgccccgctctcctggagtatgcacgcacgtgtgctcaggagggcatggtgctgtacgggtggactgatcacagcgcgtgttccccggtgtgccccgctgggatggagtaccgacagtgcgtttcaccgtgtgcaaggacttgtcaatcactccacataaacgaaatgtgtcaggagcgatgcgtcgatggttgttcttgccccgaggggcagctgctcgacgaggggttatgtgtcgaaagcaccgagtgtccttgcgtacacagcggcaaaaggtatccgcccgggacatcactctcacgcgattgtaacacttgcatatgtcggaatagccagtggatctgttctaatgaggagtgtcctggcgaatgtctggttacgggccaatcgcactttaaatctttcgacaacagatatttcactttctccggaatttgccagtatctgctcgccagggactgccaggatcactcattcagcatagtgatcgagactgtgcagtgtgcagatgatagagacgccgtttgtactcggtcggtgaccgtccgccttcccggactacacaactcactcgtcaagctcaagcatggcgcaggggtggccatggacggccaggacgtgcagctccctttgttgaagggagacttaagaatacagcatacagtgactgctagcgtccgactgagttatggtgaagacctgcagatggactgggatgggcgcgggagactcctggttaaactgtctccagtttacgccggaaagacctgcggattatgcggtaattacaatggcaaccaaggggatgactttttgacaccgtcagggctcgccgagccgcgtgtagaggacttcggtaacgcttggaagctccatggcgactgtcaggacttgcagaaacaacactctgatccgtgtgccctaaacccccgtatgaccagatttagcgaagaagcttgcgccgtcctaacatccccaacattcgaagcctgccaccgcgccgtgagccccctcccctacctgagaaactgtcggtacgacgtgtgctcttgtagcgatggccgagagtgcctgtgcggggccctggccagctacgcggctgcttgtgccggaagaggcgttcgtgttgcttggcgcgaacctggacgttgcgagctcaactgccccaagggccaggtgtacctgcaatgcggtacgccgtgtaatctgacctgccgcagcctgtcgtatcctgacgaggagtgtaatgaagcttgcctagagggatgtttctgtcccccgggactttatatggatgaaaggggagactgcgttccgaaggcccaatgtccctgttactacgatggagaaatatttcagcccgaggatatctttagcgatcaccacaccatgtgctactgcgaggatgggtttatgcactgcacaatgtccggcgtacccggaagcctcttacctgatgcagtgttgtcttcgcccctgagccacaggtcaaaaaggagcctctcttgccggccaccaatggtcaagctcgtttgcccagcagacaacttgcgtgctgaaggactagaatgcacaaaaacctgtcaaaactacgatcttgagtgtatgtctatgggctgtgtatctgggtgcctctgtccgcctggcatggttcgtcatgaaaaccgttgcgtggcactggagaggtgtccatgctttcaccagggcaaggagtatgctcctggagagacggtgaagattggatgtaacacctgcgtttgtcaggacaggaagtggaactgtactgatcacgtctgtgacgccacttgttccactatcgggatggcacactacctgacttttgatggactgaagtatctgttcccaggggaatgccaatacgtcctggttcaggattattgtgggtcaaatcctggtacgtttagaatactggttggcaacaaagggtgctcgcacccttccgtgaaatgcaagaaacgcgttaccattttggtcgagggcggggagattgagctctttgacggcgaagtgaatgtaaagcggcctatgaaggatgagactcacttcgaagtggtggaatctgggcgctatataatcctcctgctggggaaggccctgagtgttgtctgggatagacacctgagtatttccgtggtactgaaacagacctaccaggagaaggtgtgcggtctttgcgggaactttgatggaattcagaacaatgatctgaccagctcaaacctccaggtcgaagaagatcccgtggacttcggaaatagctggaaggtctcaagccagtgtgccgacacgaggaaggtgcctctggactcaagtccagctacttgccataataatattatgaagcagaccatggtcgactcctcttgcagaatccttactagtgacgtgttccaggattgtaataagcttgtggatccggagccttatttagacgtctgtatttacgacacctgtagctgtgaatctattggggactgcgcctgtttctgtgacacaattgccgcatacgctcacgtatgcgcccaacatggcaaggtggtgacttggcgaactgcgaccctgtgtccacaatcctgcgaggagcggaatttacgcgaaaacggctacgagtgtgagtggagatataattcttgtgccccagcatgccaagtgacctgccagcatcctgaaccactagcctgccctgtgcagtgcgtcgaaggatgtcacgctcattgtccccccggaaagatcttggacgagctgttgcagacctgcgttgatcccgaggactgtcctgtgtgtgaggtggcagggcgaagattcgcctctggaaagaaagtgaccctaaacccttcagatccagaacattgtcagatctgtcactgcgatgtggtgaatctgacatgcgaggcctgccaggagcccgggggcctcgtagtgccacctacggacgccccagtctcgccaacaaccctgtacgtggaggatatcagtgaacctcctctgcacgatttctattgtagccgtctgttggatctggtctttctcctggatgggtctagcagacttagcgaggctgagtttgaagtgttgaaagctttcgttgtggacatgatggagcggctgcgcatttcgcaaaaatgggttcgggtggccgtagtggaataccatgatggcagtcatgcatatattggccttaaagaccgaaagaggccctcggaactgcggcgtattgcctctcaggttaaatatgctggttctcaggtggcttctacttccgaggtgctgaagtacacccttttccaaatctttagcaagattgacagaccagaggcgtccagaatcacactgctgctgatggctagccaggaacctcagaggatgagcaggaatttcgttcggtacgtccaggggttgaaaaagaaaaaagtgatagtgatcccagtcggaattgggccacatgcgaacttaaagcagattcgtctgatcgaaaagcaggctccagaaaataaagcttttgttctctcatcagtcgacgaactggaacagcaaagggatgagatcgtgtcctacctgtgcgacctggcgcctgaggcacctcccccaacattgcccccggacatggcccaggttactgttggtcctggcctccttggtgtaagtacattaggtcccaagagaaattccatggtgctggatgtggcctttgtgttggaaggcagtgataagatcggcgaggcggactttaaccggtccaaagagttcatggaagaggtgatccaaaggatggacgtcgggcaggactccatccacgtgaccgttttgcagtatagttatatggtgacagtggaatatccatttagtgaggcacagagtaaaggtgatatcttacagcgcgtgcgggagattcgctatcagggaggaaatagaacaaatactggtctggccttaagatacctcagcgatcactcattcttagtgagtcagggcgacagggagcaggcccccaaccttgtatacatggtgaccggtaatccggcttcggatgagataaaacgactccccggtgacatccaagttgtaccgataggcgtgggacccaatgcaaacgttcaggagctggaaagaatcgggtggccaaatgcccccatcctgatccaagattttgaaaccctaccgagagaggctccagatctggtactgcagcggtgctgtagtggagaaggcctccagattcctactctaagtcccgcccccgattgttcacaacctctggatgtcattcttctgctcgatggatcatcctcctttcctgcctcttacttcgatgaaatgaaatccttcgccaaggcatttatttccaaggctaatatcgggcctcgtttgacccaggtgtcagtgttgcagtatgggtcaattacgactattgacgtcccttggaacgtggtgcccgaaaaggcacatttattgtccctggtagatgtgatgcagcgcgagggtggaccatcccagatcggagatgcactcggctttgctgttaggtacctgacaagcgaaatgcatggtgcccggcctggtgcatccaaagcagtagtgatcttggttacggacgtatcagtggactccgtagacgcagccgctgacgctgcgcgttctaacagagtgacggtattccctattggaattggagacaggtacgatgcagcacagctgagaatcctggctggaccggccggcgactccaatgtggttaaactccagcgcatcgaggacttgcccacgatggttacattggggaactcgttcctccacaaactgtgcagcggctttgtgcgcatttgtatggatgaggacggcaatgaaaaacgccccggagacgtgtggaccttgcccgaccaatgccacaccgttacttgtcagccagacggccaaactctgctcaaaagccaccgggtcaattgtgacagaggccttcgtccatcttgtcctaattcacaatcaccagtaaaggtggaggaaacttgcggatgtcgatggacctgtccatgcgtctgcaccggcagctctacgcggcatatcgtgaccttcgatggccagaactttaagctgactggtagctgcagctatgtactcttccaaaacaaggaacaggacctggaggtaatcctccataacggtgcgtgcagcccaggcgcccggcagggatgcatgaaaagcatcgaggttaaacattcagctctgtccgtggaactgcactccgacatggaggttaccgtcaacgggaggctggttagcgtgccatatgttggcggcaatatggaagtgaacgtgtacggggccattatgcatgaagtccgctttaatcacctaggccacatttttacattcaccccgcagaataacgagtttcagctgcaactgtcacctaaaacctttgcgagtaaaacatacggcctttgcggcatctgcgacgaaaatggagctaatgattttatgctcagggacggcacagtaaccacagattggaagacactggtccaggagtggactgtacagcgacctggccagacttgccagcccatcctggaagaacagtgtttagtgccagactccagccactgccaggtactactcctgcctttgttcgcagagtgtcataaggttctagccccggcgactttctacgctatatgtcagcaggacagctgccatcaggaacaggtctgcgaggttattgcctcttacgcgcacctgtgcagaaccaacggcgtgtgcgtggattggaggactccagatttttgcgctatgtcgtgccccccctccctggtatataaccattgcgagcacgggtgcccgcgacactgtgatggcaacgtgagttcctgcggcgaccacccttcggaaggctgcttctgtcccccagacaaagtgatgcttgagggtagctgtgtgcctgaggaggcatgcacacagtgtataggggaagacggggtgcagcaccaatttctggaagcctgggtgcccgaccaccagccctgccaaatttgcacatgcctgagtggccgcaaagtgaactgtaccactcaaccatgcccaactgccaaagcccctacctgcggactctgtgaggtggctcgcctccggcagaatgcggaccaatgttgtcctgaatacgagtgtgtctgcgatcctgtcagttgtgatctacctcccgtacctcactgtgagcgcgggctgcagcctactctgactaacccaggggaatgccggcctaacttcacctgtgcatgcagaaaggaggagtgcaaacgggtatccccccctagctgtccccctcataggctgccaaccctgagaaaaacacagtgttgcgacgaatatgagtgtgcgtgtaactgtgtgaatagtacagtatcctgccccctgggttatctggcctctacggcaactaacgactgcgggtgcaccaccacaacctgcctaccagataaggtgtgcgtccaccgctctacgatctacccagttgggcagttctgggaggaaggatgtgatgtatgcacttgtactgacatggaagatgcggtgatggggctgagagtggcccagtgcagtcagaagccttgtgaagattcctgtcgcagtggcttcacatacgttctgcatgagggagagtgttgcggtcgttgccttccatcagcctgtgaggtcgtcaccggtagcccgagaggggacagtcagtcctcttggaagtcagtggggagccaatgggcctctccggagaacccttgtttgattaacgagtgcgtgcgtgtcaaggaggaagtattcatacaacagcggaatgtgagttgtccccaactcgaagtgcccgtctgccctagcggtttccagttgtcttgcaagacatcggcctgctgtcccagctgtcggtgcgagcggatggaagcctgcatgttgaatggcaccgtaatcggccccggaaagaccgtaatgatcgacgtatgcacgacatgtcgttgcatggtgcaggtcggcgtcatttctggctttaagctggagtgtagaaagacgacatgcaatccctgtcctctcggctataaggaagagaacaacactggtgaatgctgtgggcgctgccttccaacggcgtgtaccattcagttaagaggcggccagatcatgacactgaaacgtgacgagaccctgcaggatggatgcgacactcacttttgcaaagtgaatgaaaggggcgaatacttctgggagaagcgagtgacgggatgccctccgtttgacgagcacaagtgcctagcagagggcgggaagatcatgaaaatccctgggacttgctgtgatacatgcgaagagccagaatgcaatgacattacggcgcggctgcaatatgtcaaggttggaagttgtaaaagcgaggtggaggtggacattcattactgccagggtaagtgtgcatctaaggcaatgtattctatcgacatcaacgacgtgcaggaccagtgctcatgctgttcccctacacggacagagccgatgcaggtcgctctccactgcaccaatggctcggtcgtatatcacgaggtgctcaatgcaatggaatgcaagtgttcaccacgcaagtgttccaag

SEQ ID NO: 21375 - DNA, 8439 bp, synthetic construct
  misc_feature 1..8439: note = source = /note="Description of Artificial Sequence: Synthetic coding sequence"
  source 1..8439: mol_type = other DNA
atgatccccgccaggttcgccggcgtgctgctggctctggccctgatattgcctggcacgttgtgcgcagaagggacccgtggtagatcctcaacggctaggtgtagcctatttggtagtgatttcgtcaataccttcgacggttctatgtattccttcgctgggtactgttcatatctacttgctggaggatgtcagaagagatccttctccatcatcggcgactttcagaacggcaagagggtttccctgtctgtctatctcggggaattctttgatattcacctgttcgttaatgggactgtcacacagggtgatcagagggtgagcatgccttacgcatccaaaggcctctatctggagactgaggccgggtattataagctgagtggtgaagcctatgggtttgtcgccaggatcgacggatccggcaacttccaggttctgctgagcgataggtacttcaacaagacctgtggcctgtgcggaaatttcaatatttttgcagaagatgatttcatgacacaggaggggactctaacctccgacccctacgattttgccaacagctgggctctgtcttcaggcgaacagtggtgcgagcgtgcctcaccacccagttcctcatgcaatatttcctccggggagatgcaaaagggcctgtgggagcagtgtcagctgctcaagtcaactagtgtttttgctcgttgtcacccattagtcgaccccgagcctttcgtcgccttgtgcgagaagacactttgtgagtgcgccggcggcctggaatgcgcctgcccagctctgctggagtacgccagaacgtgcgctcaggagggtatggtgctctatggctggaccgaccattccgcctgcagccccgtctgcccagccggaatggaatataggcaatgcgtgtccccttgtgctagaacctgccagtccctgcacatcaacgagatgtgccaagagcggtgcgtcgatgggtgcagttgtcctgaagggcagctgctagacgagggactctgcgtggagagcaccgagtgcccttgcgtgcattctggcaagcgttatcccccaggcacaagcttgtcccgcgactgcaatacatgtatctgccgcaactctcagtggatctgtagtaatgaggagtgtcctggggagtgtctcgtgaccggtcagtctcactttaaatcttttgataacaggtattttacctttagcggaatatgtcaatatctcctggcgcgcgattgtcaggaccatagcttttctattgtgatcgagactgtacagtgtgcggacgaccgcgacgccgtttgcacccggagcgtgacagtcaggctgccaggtctccacaattccctcgtgaagctgaaacatggcgctggggtggctatggacggtcaggatgttcagctccccttactcaaaggagatctcagaatccagcacactgtaactgcctcggtcaggttatcctacggtgaggatctccagatggactgggacggtcgaggccggctacttgtgaaactgtcaccagtatacgctggaaaaacctgtgggttgtgcggaaattacaacgggaaccagggtgacgactttctgacaccttctggtttggcagaaccaagagtggaagacttcggaaatgcgtggaagctccacggggattgccaggacctacagaaacagcactctgacccatgcgccctcaaccctagaatgacacgtttctccgaagaagcttgcgctgtcctgaccagcccaacattcgaagcatgccatcgcgctgtgagtcccctcccatacctgcgcaactgccgatacgatgtgtgttcttgcagcgacggacgtgagtgtttatgtggcgctctcgcaagttatgccgctgcgtgcgcgggaaggggtgtccgggtggcttggagggagccagggcggtgcgagctgaattgccctaagggacaggtgtacctgcagtgtggcactccctgtaacctcacatgtaggtcactgagctatcctgatgaagaatgcaacgaggcgtgcctggaggggtgcttctgccctccaggtctttacatggatgagcggggggattgtgtcccaaaggcacaatgtccctgttattacgacggggaaatcttccagcctgaagacattttttcagaccatcatactatgtgctactgtgaggatggattcatgcattgcaccatgtccggcgtccccggctcattactcccagatgcagtgctgagctctcccctgagtcaccggagtaagagatctttgtcctgtcgtccgcctatggtgaagctcgtttgcccggctgacaatctgagggccgaaggactcgaatgcaccaagacatgtcagaattatgacctggaatgtatgtcgatgggctgtgtgagtggatgcctgtgcccccctggcatggtgcgccacgagaacaggtgcgtggcactggagcgctgcccttgcttccatcaaggaaaggagtacgcacctggggagaccgttaagatcgggtgcaacacgtgtgtgtgtcaggatcgaaaatggaattgtaccgatcatgtgtgtgatgccacttgctcaactatcggaatggcgcattaccttactttcgatggcctgaaatatctttttccaggtgaatgccagtatgtgctggtacaagactactgtggtagcaaccccgggacctttcgcattctcgttggaaacaagggctgttctcacccatcagtgaagtgtaagaagagagtgacaatcctggtcgaggggggtgaaatcgaactatttgatggtgaagtaaacgtcaagcggcctatgaaagacgagacacacttcgaggtggtcgaatccggtagatatataattctgctgctgggaaaggcactgagtgtagtctgggacagacacctatcaatctccgtagttcttaaacagacgtaccaggaaaaggtgtgcggcctgtgtggcaatttcgatggaatccagaacaacgatctgacctctagcaacctccaggtggaggaggatcccgtggactttgggaacagctggaaagtgagttcacagtgtgctgatactcgcaaggtccccttggattcatctccagccacatgtcacaataatattatgaagcaaacaatggttgattcctcttgccgaatccttacaagcgatgtttttcaggattgcaataagttggttgacccggaaccttatctggatgtttgcatttacgatacatgtagctgtgaatctattggcgactgcgcctgcttctgcgataccattgctgcgtacgcacacgtctgtgcccagcacgggaaagtggtcacctggcgcaccgcgactctttgcccccagagttgcgaagagaggaacctcagggaaaacggctacgagtgtgaatggcgttacaactcatgtgctccagcgtgtcaggtcacatgccagcaccccgagccactggcctgccctgtacagtgtgtggagggatgtcacgctcactgtcccccaggcaagatactggatgaactgcttcagacttgcgtggacccggaagattgcccagtgtgtgaggtcgccggtcggcgtttcgctagcggaaaaaaggtcacattgaatccatccgacccagagcactgtcagatctgtcactgcgatgttgttaacttgacttgtgaagcttgccaagaacccggaggtttggttgtccctcctaccgatgcaccggtgagccctaccaccctgtatgtggaggatatcagtgagcctccactgcacgacttttattgttcaagattactggaccttgtattcctgctagatggatcttcaaggctgtccgaagcggaatttgaggtgctaaaagcctttgtcgttgatatgatggagcgactccgaatctcccagaagtgggtgcgggttgccgtggtagagtatcatgacggatctcatgcttacataggtcttaaagacagaaagcgaccgtcggagctgcgtcgcatagctagccaggtgaagtacgccgggagtcaagttgctagtaccagtgaagtgttgaagtacacgctgttccagatattctcaaagatcgaccggccagaggcatcaagaattactctcctgctcatggccagccaggagccccaacgcatgagcaggaattttgtcagatacgtgcagggtctgaagaagaaaaaggtcattgtcatccctgttgggatcggacctcatgcaaacctgaagcagattagattgatcgagaaacaagcgccggagaataaggcctttgtgctttcctctgtggatgagttggagcagcagcgtgacgaaattgtcagctacttgtgcgacctcgctcccgaggcaccgccaccaactctaccaccagatatggcccaagtcaccgtggggccgggactcctgggcgtgtcgactctgggccccaagaggaacagcatggtgctggatgtggcttttgtcctggagggttctgataaaattggtgaggctgactttaataggagtaaggagttcatggaagaggtcattcagcggatggatgtggggcaagactccatccatgtgacagtcctgcagtactcatacatggtgacagtcgagtatcctttctcggaggctcagtccaagggcgacattcttcaacgcgtgcgggaaatcaggtaccagggggggaaccggactaatacggggcttgcattgagatacctgtctgaccacagctttcttgtcagtcagggagacagggagcaggcgcctaatctggtttatatggtgaccggtaatcctgccagcgacgaaataaaaaggctccctggggacattcaggtagtgccaattggagtggggcccaatgctaatgtacaggagctggagcgaatcggttggcctaatgcacccatactaatccaggacttcgaaacgctccccagagaagcacccgatctggtgctgcagagatgttgctctggagaaggcctacaaatacctactttatctcctgcccctgactgctcacaacctctcgacgtgattctcctcctagatggcagcagctctttcccagcttcctattttgacgagatgaagtcgttcgctaaggctttcatttctaaggcaaacattggtccccggctgacccaagtcagcgttttgcagtatggctccataactacgatcgatgtgccttggaatgtggttcccgagaaggcccatctcctgagcctggtcgatgtgatgcagcgggagggggggccctcccagatcggcgatgccctgggattcgcagtcagatacttgaccagcgagatgcacggtgctaggccaggcgcatctaaagctgtggttatcctggtgacggacgtttccgtagacagcgtggacgcagcagcagacgccgctaggtctaatcgcgtcacagtttttcccatcggtataggggaccgatatgacgctgcgcagctccgcattcttgccggtcccgccggggacagcaatgtcgtaaagctccagaggattgaggatctgccgacaatggtgactctcggaaatagtttccttcacaagctgtgtagcggattcgtgcgaatttgtatggacgaagatggtaacgagaaacgacccggcgacgtgtggaccctcccggaccagtgtcataccgtcacctgccagcctgatggacagactctgttaaagtctcacagggttaactgtgaccggggccttagaccttcctgtccaaacagtcagagccctgtgaaggtggaggaaacatgtggctgtagatggacctgtccatgcgtttgcaccggctccagtacaagacacattgtgacttttgacggccagaattttaaactgaccggatcttgttcttacgtgctgttccagaataaagagcaagacctcgaagtaatcctgcataatggggcttgttcacctggcgctcgtcaaggatgtatgaagtccattgaggtcaagcactcagccctgagcgttgaactgcacagcgatatggaggtgaccgtgaatggacgtctggtttccgttccatatgttggaggtaacatggaagtaaacgtatatggcgctatcatgcatgaggtgcgttttaaccacctgggccacatttttacctttacaccacagaacaacgagttccagctacagctttccccaaaaactttcgccagcaagacctacggactctgtggcatttgcgatgagaatggagcaaacgatttcatgcttcgcgatggaactgtgactacggactggaagactctcgtgcaggagtggactgtccagcggcccgggcaaacttgtcagcccattttggaagaacagtgtcttgtgccagactcgtcccattgtcaggtgctgctcttgcctttatttgccgagtgccacaaggtgcttgccccagccaccttctacgctatatgccaacaggactcttgtcatcaagaacaagtgtgcgaggttattgcgagctacgcccacttatgtcgcacaaatggggtttgcgtggattggcgcactccagacttctgtgcgatgagttgtcctccttccctggtatacaaccattgcgaacacggatgcccacgccactgcgatggcaatgtctcctcgtgcggagaccatccctctgagggatgcttttgcccacccgacaaagttatgcttgagggatcttgtgtgccagaagaggcttgtactcagtgtattggggaagacggagtgcagcaccagttcttggaagcctgggtgcctgatcatcagccttgtcagatctgcacatgcctatctggcaggaaagtgaactgtaccacccagccttgtccaacggctaaagcccccacctgtggattgtgtgaagttgcgagactcaggcaaaacgcagatcagtgttgtccggagtacgaatgcgtgtgtgatcctgtcagctgtgacctgccgcctgttccccactgtgaaaggggcctgcagcccacgctgaccaaccctggagagtgtcggccaaatttcacatgtgcgtgtaggaaggaggagtgtaagcgtgtcagtccgccctcctgtcccccacacaggcttcctactttgcggaagacacagtgttgtgacgaatatgagtgtgcctgcaattgcgtgaatagcacggtttcttgcccactggggtatcttgcctctactgctaccaacgattgcggatgtaccaccacaacgtgtctgcctgacaaggtgtgcgtacaccggtccactatctaccctgttgggcagttctgggaggagggttgcgatgtgtgcacgtgtaccgatatggaggatgctgtgatgggcctgcgcgttgcacagtgctcccagaaaccctgcgaggattcatgtcggagcggatttacatatgttctgcacgaaggtgaatgttgtggtaggtgcctgccgagcgcctgtgaagtggttactgggtcaccccgtggcgactcacagtccagctggaaatcagtgggatcccagtgggcctcccctgaaaatccctgcctcatcaatgaatgtgtgagagttaaagaggaggtgttcattcagcaacgcaatgtcagctgcccacagctagaagttccagtgtgtcccagtggcttccaactgtcctgcaaaacatcagcttgttgtccaagctgtagatgcgagcgaatggaagcctgtatgcttaatgggaccgtcatcggccctggtaaaactgttatgatcgatgtgtgtacgacttgtcgatgcatggtccaggtgggggttatcagcggttttaagctggagtgcaggaaaactacatgtaatccgtgtcccctaggctataaggaagagaacaacaccggtgagtgttgtgggaggtgtttgcccacggcatgtaccatacagctacgcggcggccaaatcatgactctgaagagggacgagactttgcaggacggctgcgacacccatttctgtaaggtgaacgaacgcggcgagtacttctgggagaagcgcgtgactggatgtccaccctttgatgaacacaaatgtttggctgagggcggaaagatcatgaaaatccccggcacttgttgtgacacctgcgaggagcctgagtgcaacgacatcacggccaggctccagtacgtgaaggtcgggagctgtaagagtgaggtcgaggtggacattcactattgtcagggtaaatgtgcaagcaaggcaatgtattctattgatattaacgacgttcaggaccagtgcagctgttgcagcccaacacgcacggaaccaatgcaggttgctttgcactgtacgaacggctcggtagtgtatcatgaggtgctgaacgctatggagtgtaaatgttccccacgtaagtgcagcaaa

SEQ ID NO: 21376 - DNA, 8439 bp, synthetic construct
  misc_feature 1..8439: note = source = /note="Description of Artificial Sequence: Synthetic coding sequence"
  source 1..8439: mol_type = other DNA
atgatcccagcaaggtttgctggggtgctacttgcccttgcactcattctgccggggacattgtgcgcggaagggactaggggacgtagctctacggctagatgttctttgtttgggtcggacttcgtgaataccttcgatggatctatgtatagcttcgctggctactgtagctatctccttgcgggtggctgccaaaagcgctctttctctatcattggtgatttccagaacggcaagagagttagcctgtcagtataccttggggagttttttgacattcacctctttgtgaacggcacggtaactcagggtgatcagagggtgtcaatgccgtatgcttctaagggcttgtatttggagacggaggctggttattataaactcagtggtgaggcctacggctttgttgcaagaattgatggaagtggcaacttccaagtgctgctgagtgataggtatttcaataaaacctgcggcttatgtggtaactttaatattttcgctgaggatgattttatgacacaggagggtaccctcacttcagatccatacgatttcgctaattcttgggctctgtcttcgggcgagcaatggtgtgaaagagctagccctccatccagttcctgcaatatcagctccggtgagatgcaaaaagggctctgggagcaatgtcaacttcttaaatccacttccgttttcgccagatgccatccactagtggatcccgaaccgttcgtagcactgtgcgagaaaaccttgtgcgaatgtgcaggggggcttgaatgcgcatgtcccgctttgttggagtatgctagaacctgtgcacaagagggcatggtgctatatggctggaccgatcactcagcttgcagtccagtgtgtccagcaggaatggagtacagacagtgcgtgtccccttgtgctaggacatgccagagcctacatattaacgaaatgtgccaagagcggtgtgtggatggttgctcttgcccggagggacaattgttggatgaaggtctgtgtgttgaatccacagagtgcccttgcgtgcatagcggtaagagatatcctccaggaactagcctcagtcgagattgtaatacgtgtatttgcaggaacagccaatggatatgttctaacgaagaatgccctggagagtgtcttgtcactggtcaaagtcacttcaaaagttttgacaatcgatatttcacattcagtgggatttgtcaatacttgctagctcgtgattgccaggaccatagcttctctattgtgatcgagactgttcaatgtgctgatgatcgcgatgctgtctgcacacgaagcgttaccgtgaggttgcctggattgcacaactctcttgttaaattaaagcatggagcaggcgttgcaatggacggtcaagatgttcagctcccacttctaaaaggggaccttcgtattcagcacactgtgactgccagtgtgaggcttagttatggggaagatctgcaaatggattgggacggtcgtgggcgactccttgttaaactgtcaccagtctacgccggcaaaacgtgtggactttgcggtaattacaacggaaaccagggcgatgatttcttaaccccatctggacttgcggagcccagagtggaggattttggtaatgcgtggaagcttcatggagattgccaggatcttcaaaagcagcattcggatccttgtgcgctaaacccaagaatgactagattcagcgaagaggcgtgtgctgttttgacttctccaacctttgaggcatgccatagggctgtttcacctcttccgtatcttaggaattgtcggtatgacgtgtgttcttgttctgatgggagggagtgtctctgcggggcactggcttcttacgcggctgcctgtgcaggtcgaggcgtgagagttgcatggcgggaaccaggtagatgcgagcttaattgccctaagggtcaagtttaccttcagtgcggtacaccgtgtaaccttacgtgccgttcgctgtcttatccagatgaggaatgcaacgaagcctgcctcgagggctgcttttgcccacctgggttatatatggatgaaagaggcgattgcgtgcccaaagctcagtgtccgtgctactatgacggggagatctttcagccggaggatatcttttctgaccatcacaccatgtgctattgtgaagatggcttcatgcattgcactatgtcaggtgtgccaggatccttactcccagacgcagtgctgtcttccccattatctcataggtctaagagatctttgagctgccggcctcccatggttaaactcgtttgcccagccgataacctcagagcagagggcttggaatgcacaaagacgtgccagaactacgatctggaatgtatgagtatggggtgtgttagtggatgtctttgtccaccaggtatggtcaggcacgagaatagatgcgtggcactcgaacgatgcccttgctttcatcaaggcaaagagtacgccccaggggaaactgttaaaatcgggtgtaatacctgtgtctgtcaagatcgtaagtggaattgtacagatcacgtgtgcgacgccacttgtagcaccatagggatggctcattacctgacttttgacggactgaaatatctttttccgggagaatgtcaatatgtcttagttcaggactattgcggcagcaaccctgggactttcagaattctagttggtaacaaggggtgtagccatccctctgtcaagtgtaagaaaagggtaactattttggttgagggtggagaaattgagttatttgatggagaggttaacgtcaaacgaccaatgaaagatgagactcactttgaagtagttgagagcggtcgatacataatattgctactcggaaaggccttgagcgtcgtttgggaccggcacctctcaattagcgttgttctcaagcagacgtaccaggaaaaggtttgtgggctctgcgggaactttgatggcatccagaacaatgatctcacatcctcgaaccttcaagtggaagaggatccagttgactttggtaactcatggaaggtctcttctcaatgcgccgatacgcgaaaagtcccactagattcatcaccagctacttgccataacaatattatgaaacaaactatggttgattcttcttgccggattctcacctctgatgttttccaagattgtaacaagttggttgatcccgaaccttatctcgatgtttgcatttacgacacatgctcgtgtgagtccattggagactgtgcgtgtttctgcgatacgatcgcagcttacgctcacgtttgtgctcagcatggtaaagttgtaacgtggcgaacagctactttatgtcctcaatcttgcgaggaaaggaacctcagggagaatgggtatgagtgcgaatggcgttacaattcttgcgctcctgcatgtcaggtaacttgccaacatccagaacctttggcctgccctgttcaatgtgttgagggatgtcacgctcattgccccccaggtaagatactggacgagttgttgcaaacttgcgtggatcccgaagattgccctgtgtgcgaggttgcaggtagaaggtttgcatcagggaagaaggttacgctgaatccttccgatcctgaacattgtcaaatctgtcattgtgatgtcgttaatcttacatgcgaagcttgccaagagcctggtggattagttgttcctccaaccgatgcgcctgtaagcccgaccacattgtatgttgaagacatcagtgagcctccacttcatgatttttattgcagccgattactcgatctcgtttttttactcgacggttctagcagactttctgaagctgaattcgaggttcttaaggcattcgtggtagacatgatggagcgacttagaatctcacaaaaatgggtcagagttgctgttgttgaatatcacgacgggtctcatgcgtacattggcttgaaagatcgaaaaaggccgagcgaactgagaagaattgctagtcaagtgaagtacgcaggatcacaagtcgcatccacttctgaagtgctgaagtatactttgtttcaaattttttccaagattgaccgtcctgaggctagtagaatcaccctcctgcttatggcgtcacaggagccacaacgtatgtcaagaaattttgtgagatatgttcaaggccttaaaaagaaaaaagtcatagttatccccgtgggcatcggtcctcatgctaacctaaaacagataaggttaatcgagaagcaggcacccgaaaataaagcttttgtgttgagtagtgtggacgagcttgaacaacaaagagatgagatcgtttcctatctttgcgatctcgctcctgaggctccaccacctacattgccaccagatatggcccaagtcaccgtgggtcctggtttgctgggtgtgtcaactttgggacccaagcgtaatagtatggttttggatgttgcgtttgttttggaagggagtgataaaattggggaagctgattttaatcgcagtaaagagttcatggaggaagtgatacaacgaatggacgttggccaggattctattcatgtaacagtcttgcaatattcatatatggttacagtggagtatccattcagcgaagctcaaagcaagggcgacattctccaacgcgttcgagagatcagataccaaggtggaaacagaacaaacactggacttgccctcagatatttatctgaccattcattccttgtttcccagggagatagggagcaggctccaaatcttgtttatatggtcactggtaatcctgcttcggatgaaattaaaaggcttccgggtgatatacaagtggtacctattggcgtgggtccgaatgcgaatgttcaggaactggagagaattggatggcccaacgctccaatattgatccaggacttcgagacacttccacgggaagcgccagatctggtattacaacgctgctgttctggtgaaggacttcagattcctacattatcacctgctcctgattgttcacagccccttgatgtgatcttgctgttggatgggtctagttcgttccccgcatcgtactttgatgaaatgaaatcatttgctaaagctttcatcagcaaggcaaacattggtccacgtcttacacaagtgtctgtcctccaatatggatcgataaccactatcgatgttccatggaatgttgtccctgaaaaggctcacttgttgagtcttgttgacgttatgcaacgagaaggagggccatcacaaataggtgatgctctgggttttgccgtgcggtatttgacttccgagatgcatggcgcacgccccggggcatctaaagcagttgtcattttggttaccgatgtttccgtggactccgttgatgctgccgccgacgcggcgcgtagcaatcgagttacagtttttcctattggtatcggcgatagatacgacgctgctcaactacgtatactggctggaccagcgggagactcaaacgtggttaagcttcaaaggattgaggacttacctacaatggttactcttggcaactcattcttgcacaaattgtgttcggggtttgttaggatatgtatggatgaggacggcaatgagaaacggcctggtgacgtctggacactacctgatcaatgtcatacggtgacatgtcagccagatggccagactcttttgaaatctcatagagttaattgcgaccgtggtttgcgaccttcttgccctaactcccagtcgccagttaaggttgaggaaacctgcgggtgcagatggacttgcccctgtgtgtgtactggttcttccactaggcatatcgtcacttttgacggacagaatttcaagcttacaggtagttgcagctatgttttgttccaaaataaggaacaagacctagaggtcattttgcacaatggtgcctgcagccccggggctaggcagggttgcatgaaaagcattgaagtgaaacattctgctttgtctgttgaacttcattcagatatggaggttacagttaacgggcggttagtgtcagtcccttatgtcggcgggaatatggaagttaacgtgtacggagcaatcatgcacgaggtgcgttttaatcatctggggcatatttttacctttactccacaaaacaacgaattccagttacagcttagccctaaaacattcgcttcaaaaacctatggcctctgtggcatatgtgacgagaacggcgcaaatgacttcatgttacgtgatggtactgtaactactgattggaagactcttgtgcaggaatggacagtgcagcgccccggccagacttgccagcccatcctcgaggaacagtgcttggttcctgattcctctcattgtcaagttctattattgccactcttcgcagagtgtcataaggtgcttgcgccggctacattttatgcaatctgtcagcaggattcctgtcaccaggagcaagtttgtgaagtaatcgccagctacgcgcacttatgccggacaaatggtgtatgtgtggattggcggacacccgacttttgcgccatgagctgtcctccctcactcgtgtacaaccattgcgaacacggatgtcctcgacattgtgatggaaatgtgtcatcttgcggggatcatccctccgaaggttgcttttgcccacctgataaggtaatgcttgagggaagctgtgttcctgaagaagcttgtactcagtgcattggtgaagatggtgttcaacaccagtttctcgaggcatgggttccggaccatcagccctgtcagatttgcacctgcctctcgggaagaaaggtcaactgcactacacagccttgtccaactgcaaaggcccctacatgtggtctctgcgaggtcgctcggcttaggcaaaatgccgatcagtgctgtccggaatatgagtgcgtttgtgatcctgtttcctgcgatttaccacctgttccacattgcgagcgtgggctacaacccactttgacaaacccaggggaatgccgacccaacttcacttgtgcctgtcggaaagaagaatgcaaaagagtgagccctccatcatgccctcctcaccgtctgccaaccttgagaaaaactcagtgctgcgatgagtacgagtgtgcctgtaactgcgttaattcgaccgtatcctgtccattaggatatttagcttctaccgcaaccaacgattgcggttgtacgactaccacatgccttccagacaaggtttgtgtgcatagaagtactatctatcctgtcggtcagttttgggaagaaggctgtgacgtgtgtacctgcacagacatggaggatgcggttatgggtcttagggtcgcacagtgctcccaaaagccgtgcgaggactcatgccgtagcggattcacctatgtccttcatgagggtgaatgctgtggacgatgcttgccgtctgcctgcgaggttgtgaccggaagtcctagaggagattcccaaagttcgtggaagtctgtgggatcccagtgggcaagccccgagaacccttgtctgataaatgagtgtgttagggttaaagaggaggtctttattcagcaaagaaatgtctcatgcccccaactggaggttcccgtttgtccaagtggatttcagttgtcatgtaagaccagtgcgtgctgccctagttgccggtgtgagcgaatggaggcttgcatgttgaatggtactgtcatcggaccaggcaaaaccgttatgattgatgtatgtactacatgtcgctgcatggtgcaagttggtgttatttccggattcaagttagagtgtagaaaaacaacttgcaatccctgcccactcggttataaagaggagaataacacgggagagtgttgcggacgttgtcttcccacagcttgtaccatccaacttagaggaggtcaaataatgaccttgaaaagagatgaaacactgcaagacggttgtgatactcatttctgcaaggtcaatgaaagaggtgagtatttctgggagaagagagtgaccggttgccctccattcgacgagcacaagtgtttagccgagggtggcaagattatgaaaatccctggaacgtgctgcgatacttgtgaggagccggaatgtaatgacatcacagcacgacttcagtacgtgaaagtgggtagctgcaagtctgaggtcgaagtggatatccattactgtcaggggaaatgcgcttccaaagccatgtattcaatcgatatcaacgatgtacaagatcaatgttcctgctgttcccctacaaggaccgagcctatgcaagtggctcttcattgtacaaatggttcagttgtgtatcatgaggtgcttaatgccatggagtgtaaatgttctcccagaaagtgctcaaaa

SEQ ID NO: 21377 - DNA, 8439 bp, synthetic construct
  misc_feature 1..8439: note = source = /note="Description of Artificial Sequence: Synthetic coding sequence"
  source 1..8439: mol_type = other DNA
atgattccagcgagattcgctggcgtgctgcttgcgcttgccttaatcctgcccggtactctatgcgccgagggtacccgaggccgcagctcaaccgcccgctgttcattattcggctctgactttgtcaacactttcgacggctctatgtattcttttgccggctactgttcctacctgttggctggaggctgccagaagcgctcattttccatcattggggattttcaaaatgggaagcgggtttcactgtctgtgtacctgggtgaattctttgatatccatctgttcgttaatggcacagtcacccaaggggaccagcgggtgagtatgccttatgcttcaaagggcctttacttggagaccgaggcggggtattacaaactgagcggtgaggcctatggctttgttgctaggatcgacggctctggcaatttccaggtgctgttatctgacagatattttaacaagacctgcggtctgtgtggcaatttcaacattttcgccgaggacgacttcatgactcaggagggaacactcacgtctgatccttacgacttcgccaattcctgggctttatcaagcggagagcagtggtgcgaaagagcttctcccccctccagcagctgcaacatctcatcaggcgaaatgcagaagggcctgtgggagcagtgtcagctgctgaagtcgaccagcgttttcgccaggtgtcatccattagtggaccctgagccatttgtcgcgctgtgcgagaagactctttgcgagtgcgccggcgggttagaatgtgcctgtccagccctgctcgagtacgcaaggacctgtgcccaagaagggatggtcctctatggctggacggaccactccgcatgcagtcccgtctgtccagctggaatggaataccgccagtgcgtgtccccatgtgctcgtacctgccaatccctgcacatcaatgagatgtgccaggagcggtgcgtggacggttgttcttgtcctgaaggccagctcctggatgaagggttgtgcgtggagagcaccgaatgcccttgtgtccatagtggtaagagatatcctcccggaacctctctttccagagattgcaatacttgtatctgtcgaaacagccagtggatttgtagcaacgaggaatgccccggcgagtgcctggtcaccggccagagccacttcaagtcattcgacaaccggtattttaccttttctgggatatgtcagtatctgttggctagggactgccaggatcactcattttccatagtgattgaaacagtgcagtgcgcagacgacagagacgccgtctgtactcgcagcgtgactgtgagactccctggattacacaacagcctggtgaagctcaaacatggagcaggcgtggctatggacgggcaggatgttcagctcccactattaaaaggcgatctcagaatacagcacacagtgaccgccagcgtcagattgagctacggagaggacctgcagatggactgggatggtcggggtcgccttctggtgaaactctccccagtctatgctggcaaaacatgtggcctatgcggcaactacaatggcaatcagggcgatgacttcttgaccccctccggtctcgccgagcctagagtggaggatttcgggaatgcctggaagttgcatggcgactgtcaggacttgcagaagcagcacagcgatccttgcgctttgaacccacgcatgacgcgcttctctgaggaggcctgtgccgtgttaacttctcccacctttgaggcgtgccatagagccgtgtcccctctgccatacttgaggaattgtcgctatgatgtctgctcttgcagcgatgggagggaatgcctatgtggggccctggcctcgtacgctgccgcctgtgcgggaaggggcgtgagagtggcctggagggagcccggccgctgtgaactgaattgtccaaaggggcaggtgtacctgcaatgtggaacgccgtgtaatctgacttgtaggagcctgagctaccccgatgaggagtgtaacgaggcctgtctggaaggatgtttttgtccaccaggtctgtatatggatgagcgcggagactgtgtccccaaagctcagtgcccatgctactacgacggcgaaatcttccagccggaggacatcttctctgaccaccacactatgtgttactgtgaggacggattcatgcattgcactatgtccggggttcctggtagcctccttccagacgccgtcctgagttctccactgagccacaggagcaagagatctctctcttgcaggccccctatggtgaaacttgtgtgcccagcagataacctgagagcagagggactcgaatgcacgaaaacgtgtcaaaattatgatttggagtgcatgtcaatgggctgtgtgagcggatgcctgtgtccccccggtatggtgcggcacgaaaacaggtgcgtggcccttgagcgttgtccctgcttccatcagggaaaggagtacgcgccgggagaaacggtgaagatcgggtgtaatacctgtgtgtgccaagaccggaagtggaactgtacagaccacgtgtgcgatgccacctgtagcacaattggaatggcacactacttgacctttgatggactcaagtatctgttccctggcgagtgccagtacgtgctcgtgcaggactactgtggttccaaccccggtactttcaggatcctggtgggcaacaaagggtgcagccatccatccgtgaagtgcaagaaaagggtcaccattctggtggagggaggggagattgaactgttcgatggtgaggtgaacgttaaacgccctatgaaagacgaaactcactttgaggtcgtcgaatccggcaggtacatcatcctgctcctcggcaaggccctgtcagtcgtgtgggaccgccacctgtccatcagcgtggttctcaagcagacctaccaggaaaaggtgtgtggactttgtggcaactttgacgggatccaaaacaacgatttaacctccagcaatttgcaggtggaggaggatcccgtcgatttcggcaactcatggaaagtcagctctcaatgtgcggatacacgcaaggtgccattggacagttctcccgccacttgtcataacaacatcatgaagcagactatggtagactcctcgtgccgcatcctcacgagcgatgttttccaggattgtaacaagctggtcgatcccgagccttatctcgatgtgtgcatatacgatacctgcagttgtgagtccattggggactgcgcatgcttttgcgatacaatcgctgcgtacgcccacgtttgcgcgcagcacgggaaggtggtcacatggaggaccgcgactctgtgtccccaaagttgcgaagagcggaacctgcgggagaacggctacgagtgtgaatggcggtataatagctgtgcccctgcttgtcaggtaacttgtcagcatcctgaacccctggcttgccccgtgcagtgcgtggaagggtgtcacgcccattgtccaccgggtaagatcctagatgaactgctgcaaacatgcgtggaccctgaagattgccccgtttgtgaagtggctggcagacggttcgcttcagggaagaaggtcacactgaaccctagcgatcctgagcattgtcagatttgtcactgtgatgtggtaaatttgacctgtgaggcttgtcaagagcccggtggactcgttgtcccccctacagacgctccagtgtccccaaccaccttgtacgtggaggatatctccgaaccacctctgcacgacttttactgctctagactactggaccttgtattcctccttgacggctcaagcaggttatctgaggcggagttcgaggtgcttaaggctttcgtcgtggacatgatggagaggcttcgaatttcgcagaagtgggtgcgggttgctgtcgttgaatatcacgacggatcccatgcttacattggcttaaaggaccgtaagcgtcctagtgagctcaggagaatcgcctcacaggtcaaatacgctgggagtcaagtggcttctacctccgaagtgctcaagtataccttgtttcagatcttctccaaaattgaccggcctgaagcaagtcgcattaccctgctgctgatggcttcccaagagccacagcgtatgtcacggaattttgttcggtatgtacagggcttgaaaaagaagaaagtgatagtgattccagtaggcatcggcccacacgccaatcttaaacagatcaggttgattgagaaacaagccccagagaataaggcctttgtcctgtcctccgtcgatgagcttgaacagcagagagatgagatcgtttcttatctctgtgacctggcgccagaggcgcccccacccacactgccccccgacatggcccaagtcacggtcggccccggactattgggggtctccaccctcgggccaaagcggaactcaatggtgctggatgtggcatttgtgctcgagggtagcgacaaaatcggcgaagccgactttaaccgcagcaaggagttcatggaagaggtcatccagcgcatggacgtgggacaggactccatacacgttaccgtcctgcagtattcttacatggtgaccgtcgagtatccattctcagaggctcagtctaaaggagacatcctgcaaagggtgcgcgaaataagataccagggcgggaatcgcaccaacactggattggccttaaggtacctgtcggatcactctttcctggtctcccaaggcgatagggagcaagcaccgaacctggtgtatatggtcacggggaatccagcaagtgacgagatcaagcgcctaccgggagacatccaggtggtgcctattggcgtgggacccaatgccaacgtgcaggagctggagaggatcggctggcccaatgcccccatcctgattcaggacttcgagaccttgccgcgagaagcaccagacctcgtcctgcagcggtgctgttcaggggaggggcttcagatccccacattgtcaccagcgcctgactgctcgcagccactcgatgtgatcctgttactggatgggtctagttctttcccagcgtcctactttgatgagatgaaaagtttcgccaaggcattcatctcgaaagctaacatcggtccaaggcttacccaagtaagcgtcctgcagtacggcagtattacaactattgacgtgccttggaatgtggttcccgagaaggctcacctgctctccttagtggacgtcatgcagcgggaagggggcccttcccagattggtgacgcgcttgggttcgccgtccgctatctcacgagcgaaatgcacggcgctaggccgggggcatctaaggccgtggtgattcttgtgacagacgtttccgttgattctgtggacgctgccgcagacgccgcccgctccaacagggtgaccgtgttcccaatcggaatcggcgatcgctatgacgccgcccaactgcgaatcctggcaggtcccgcaggcgactccaacgtggtgaaactccaacgtattgaagacctgcctaccatggtaactctgggaaactcctttctgcataagttgtgcagtggatttgtgcgcatctgcatggatgaggacggtaacgagaaacgccccggagatgtctggactctgcccgatcagtgccatactgttacctgtcagcccgacggacagacccttctcaagtcccaccgcgtcaactgtgatagagggctgcggcccagctgtccaaactcccaaagtcctgtgaaagtggaggagacttgcggttgtcggtggacgtgcccctgcgtgtgcaccggctccagcaccagacatatcgtcactttcgacggacagaacttcaaacttacaggctcttgctcctacgttctgtttcagaacaaagaacaggacctggaggtgatactgcataatggtgcctgttccccgggggctaggcagggctgcatgaaatccattgaagtgaaacactctgccctcagcgttgagttgcattccgatatggaagttactgtgaatggacggctggtatcagtgccctatgtcgggggcaatatggaagtgaacgtctacggagccatcatgcatgaagtgcgctttaaccacctgggccatatctttaccttcaccccacagaataatgagtttcaactgcagttatctcccaagacctttgccagcaaaacttacggcctgtgcggtatctgcgatgagaatggcgccaatgattttatgttgagggatgggacggtgactaccgactggaaaactttggtccaggaatggacagtgcagaggcccggacagacctgtcagccaatcctggaggaacagtgtctggttcctgatagctcccattgtcaggtgcttctcctgcccctcttcgccgagtgtcataaggtcctggcccctgcaaccttttatgctatttgtcagcaggattcttgccatcaagagcaggtgtgcgaagttatcgcatcctatgcccacctgtgcagaactaacggggtttgcgtcgactggaggacccccgatttctgcgccatgtcttgccctccttccctggtgtacaatcattgtgagcatggctgcccccgtcattgcgatggcaacgtaagcagttgtggcgaccacccctcagaggggtgcttctgcccccccgataaagtgatgctggagggcagctgtgtgccagaggaggcatgtacccagtgcatcggagaggatggtgtccagcatcagttcctcgaggcgtgggttccagatcaccagccctgtcaaatctgcacttgcctgagtggccgaaaggtaaactgcactactcaaccatgtccaaccgcaaaggctcctacatgcggcctctgtgaggtggctcgcttgcgacagaacgctgaccagtgttgccccgaatatgaatgtgtgtgcgatcccgtctcttgcgacttgcctcccgttccacactgtgagcgggggctgcaacccaccctcaccaatcccggggagtgcaggccaaattttacctgcgcttgtaggaaggaagaatgcaagcgcgtgtcacccccgagctgcccccctcatcggctgcccaccttacgaaagactcaatgctgcgacgagtatgagtgtgcctgcaattgtgtaaactctacggtatcttgtcctctgggatatctcgcctcgaccgcgactaacgactgtgggtgtactaccaccacttgtctcccagataaggtctgtgtccacagatcaaccatctacccggtgggacagttttgggaagaaggttgcgatgtgtgtacatgcaccgatatggaagatgctgtgatgggcttgcgggtagcccaatgcagccaaaaaccctgcgaggacagttgtagatccgggttcacctacgtgttgcatgagggagagtgctgcggcagatgtctaccatccgcatgcgaagtggtgaccggcagtccacgcggtgattcccagagttcttggaaatccgtggggtctcagtgggcgtccccagagaatccatgcttgattaatgagtgtgtcagagtgaaggaggaggtgttcattcagcagcggaacgtgtcttgcccacagctggaagtgccagtgtgtccctccggcttccagctgtcttgtaaaacgtccgcctgctgtccctcctgtcggtgtgagaggatggaggcatgcatgcttaacggcaccgtgatcggccccggtaaaacagtaatgatcgacgtgtgtactacctgccgatgcatggtgcaggtcggggtcatctctggcttcaagctggaatgccgaaaaaccacttgcaacccatgtcccctgggatacaaggaagagaataatactggtgagtgctgcggccgctgcctgccaaccgcctgcacaatccagctgagaggtgggcaaataatgactttaaaacgagacgagacgttgcaggacgggtgcgacacccacttttgtaaagtgaatgagagaggggaatacttctgggaaaagcgagttactggatgccccccttttgacgaacataagtgcttggccgaggggggcaagataatgaagatccccggtacttgctgcgacacatgcgaggaacctgagtgtaatgacatcaccgcacgactacagtacgtaaaggtcgggtcttgcaagagcgaagtggaggtcgacatccactactgtcagggcaagtgcgcttctaaggcgatgtatagcatcgacattaatgacgtccaggaccagtgcagctgttgtagccctacccgcaccgagccgatgcaggtcgccctgcattgcaccaacgggtctgtggtttaccacgaagttctgaacgccatggaatgcaagtgtagcccaaggaaatgctctaag

SEQ ID NO: 21378 - DNA, 8439 bp, synthetic construct
  misc_feature 1..8439: note = source = /note="Description of Artificial Sequence: Synthetic coding sequence"
  source 1..8439: mol_type = other DNA
atgatccccgcccggttcgcaggtgtgctgctggcactagccctgattctgcctggcactctgtgtgcggagggaaccaggggacgaagcagtactgccagatgcagtttgttcggctcagacttcgtgaacaccttcgacggctctatgtacagcttcgccggatactgtagttacttgctggctggcggatgccaaaaacggtcgttttctatcatcggagacttccagaacggtaaacgcgttagcctgtctgtgtacctcggagaattttttgatatccaccttttcgttaacggcacagttacccagggggatcagcgtgtgagtatgccatatgccagtaagggtttatatcttgagaccgaggcgggatattacaagctgagtggcgaagcctatggcttcgtggcgaggattgacgggtcgggtaatttccaggtcctcctgagtgacagatattttaataaaacctgcggcctgtgtgggaactttaacatctttgccgaggatgacttcatgacccaagagggtacccttacaagcgacccctatgacttcgccaactcctgggccctatcatcaggtgagcagtggtgtgaaagggcaagtcctcccagtagttcatgcaacatctcgagtggcgagatgcagaaaggcctctgggagcaatgccagctactgaaaagtacatctgtgttcgctcggtgccaccccctggtggaccctgagccttttgtagccttatgtgagaagactttatgcgagtgcgctgggggattggagtgtgcttgcccagccctgctggaatacgcgcggacctgtgcacaggaagggatggtcttgtacggctggactgaccatagcgcatgctccccggtttgccccgcagggatggagtacaggcaatgtgtatcaccatgtgcccggacttgccagtccctacacatcaacgaaatgtgccaggaaagatgcgtggacggctgctcttgccccgaagggcagctcctggacgaggggctgtgtgtggaatcgacagagtgtccttgcgtgcactctggtaagagatatccaccagggacgtccttgtctagggattgtaatacatgcatttgtagaaattctcagtggatatgctcaaatgaggaatgtcccggggagtgcttagttactggtcaaagtcattttaaatcattcgacaacaggtactttacgttcagcggaatttgccagtaccttctcgccagggactgccaagaccacagctttagtatcgtcatcgagacagttcagtgtgcagatgaccgcgatgcagtgtgcactcggagtgtcaccgttcggctgcccgggctacacaactcactggtgaagcttaagcacggcgccggagttgcgatggacggtcaggatgttcagctccctcttctaaaaggcgatctgaggattcaacatacggtgaccgcatcagtgagactatcatacggtgaggacctccaaatggattgggatggccgcggaaggctcctggttaagctttcacccgtgtacgcagggaaaacgtgcggcctttgtggcaattacaacgggaaccagggcgatgactttctaaccccttctggactagccgagcctagggtggaagactttggaaatgcatggaagctacacggggattgtcaagatctgcagaaacagcatagcgacccctgtgccctgaacccacgcatgactcggttctctgaggaagcctgcgccgttctgacttcccctactttcgaagcctgtcacagggccgtgtctcctctgccttacttgcggaactgtcgatacgacgtctgttcgtgttccgacggcagggagtgcctgtgtggcgccctggcctcatacgccgcagcatgtgctggaaggggcgtgagggtagcgtggcgggagcctgggcgatgcgagctaaactgtcctaagggccaggtatatctacagtgtggcaccccctgcaacctgacctgccggtccctctcctatccggatgaagagtgtaacgaggcatgtctggagggctgtttttgccctccgggcctgtacatggatgaaaggggggactgtgtgccaaaagcgcagtgtccttgctactacgacggagagatcttccagcccgaggacatattctccgaccaccatacgatgtgctactgcgaagatggctttatgcactgtaccatgagtggagtgcctggcagcctgttgccagacgcagtgttatcttctcccctgagccaccgaagcaaaaggtccctgtcttgccggcccccaatggtgaaattagtgtgtcccgctgataacctgcgggccgaaggccttgagtgtaccaagacctgccaaaactacgatctagagtgtatgagtatgggctgtgtgtccggttgtctatgcccaccaggaatggtgcgccacgaaaacaggtgtgtggctctcgagagatgcccctgcttccatcagggaaaagagtacgcccctggtgagaccgtcaaaatcggatgcaacacatgtgtttgtcaggaccggaagtggaattgcacggatcatgtctgtgacgccacttgtagcactattggtatggcgcactacctgacttttgatgggttgaaatacctgttccccggagaatgtcagtacgttctggtgcaggactactgcgggagcaacccagggacattccgcatcttggtaggcaacaagggatgcagtcatccgtcggtaaagtgcaagaaaagagtcactatattggtggagggtggtgagattgaactcttcgacggggaggtgaacgtaaaaaggcccatgaaagatgagactcattttgaagtggtcgagagcggcagatatattattctgctgttaggaaaagctctttctgttgtttgggaccggcacctgagcattagcgtggtcctgaaacagacataccaggaaaaagtgtgcggactatgcgggaattttgacggcattcagaacaacgacttaacctcaagcaatctgcaggtcgaggaggatccggtggactttggaaatagctggaaagtgtcatctcaatgtgccgatacccggaaagtcccgctcgactcatcccccgccacctgtcacaacaacatcatgaaacagaccatggtcgactccagttgtaggattctcacgtctgacgtgttccaggactgcaacaaactggtcgaccccgaaccttacttagatgtctgcatatacgacacttgctcttgcgaatcaattggtgattgcgcctgtttttgcgacacaatagctgcatatgcccatgtgtgtgctcagcacggtaaagtagttacctggcggactgccaccctgtgtccacaatcttgtgaggagaggaaccttcgcgaaaatggatatgaatgcgaatggaggtacaactcctgtgcgcccgcctgtcaggtaacttgtcagcatcccgagccgctcgcatgtcctgtacagtgcgttgaaggctgtcatgcgcactgtccacctggcaagattctggacgagctgctgcaaacttgcgttgaccctgaagactgcccggtttgcgaggtggccggtagacgattcgcatccggaaagaaagttacactcaatccttctgaccctgagcactgtcaaatctgtcattgcgatgtggtgaaccttacatgcgaggcatgtcaggagccaggcgggctagtcgtcccacctaccgacgccccagtgtctcctaccaccctgtatgttgaagatattagtgagccaccactgcacgatttttattgctccaggctgttagacctggtgttccttttagatggtagcagcaggcttagtgaggccgaatttgaggtgctaaaagcctttgtggttgatatgatggaaagacttcggattagccagaaatgggtccgcgtagcagtggtagagtatcacgatggctctcacgcctatatcggcctgaaggatcgcaagaggccatctgaactgagaaggattgcttcccaggtgaagtacgcagggtcccaagtagcctctacttctgaggtgttaaagtataccttgtttcagattttctcaaagatagatcggcctgaggccagccgtatcaccctgttgttaatggcttctcaggaaccacaacgaatgtcacggaattttgttcgctatgtccagggattgaagaaaaagaaggtgatagtaatcccggtcggtatcggcccacatgccaatttaaagcagatcaggctcattgagaagcaggcaccagagaataaggcgttcgtgctgtcttccgtggacgagctcgagcagcagcgtgacgagattgttagttacctgtgcgacctggccccagaggctccaccaccaaccttaccgccagacatggctcaggtgacagtggggccaggcctactgggagtgtcaacgcttgggccaaagagaaactccatggtcctggatgtggcgtttgtcttggaaggtagcgacaagataggcgaagctgacttcaatagaagtaaagagttcatggaagaggtaatccagagaatggacgtggggcaggattcgatccacgttacggtattgcagtactcctatatggtgacagtagaatatccattttcagaggcgcagtccaaaggcgatattctccaacgcgtgcgggagattcggtatcagggaggcaatcgcactaacaccggcctagccctgaggtatctttcagatcactcctttctcgttagccagggtgatcgcgagcaagcacccaatctcgtgtatatggtgacggggaatcctgctagcgacgaaatcaagagattgcctggagacatacaggtggtgcccatcggcgtcggtcctaatgcaaatgtacaggaactcgaacggattggatggccaaatgccccaattctgatacaggatttcgaaactcttccgcgggaggctccagacttagtgttgcagcgctgctgctctggggaaggtctgcagatcccgactttgtcacctgctccagattgtagccagcctttggatgtgatcctactgctggacggttcatcctccttcccagcgtcctacttcgacgagatgaaaagctttgcaaaggcatttatctccaaagctaatatcggcccgcggctaacacaagtgagcgtgctccagtatggatcgattactacaatcgacgtcccttggaacgtggtgcccgagaaagcgcatctcctcagtctggtggatgtgatgcagcgtgagggtggtccgtctcagattggcgacgctctgggtttcgcggtgaggtatttgacgtcagagatgcatggtgcccgacctggggcatccaaagcagtagtcatattggtcacagacgttagcgtggatagcgtggacgctgcagcagacgccgcccggtctaaccgggtcaccgtgtttccaatcgggattggagatcggtacgacgccgctcagctcaggatcttagccggacccgccggagatagtaacgtcgtgaaattacagcggatcgaggacctgcccacaatggtaacacttggcaattccttcttgcataaactctgctcaggctttgttcgtatctgtatggatgaggacgggaacgagaagcgaccaggtgacgtgtggacgcttcctgaccaatgtcacaccgtaacctgccagcctgacggacaaacacttttgaagtcacacagagtaaattgtgatcggggtctgcggccatcctgccctaactcacaatccccagtcaaagtagaggaaacctgtggttgcaggtggacctgcccttgtgtgtgcactggctcctccaccagacacatcgtcacttttgacggccagaactttaagttgactggttcctgcagttacgtgctgttccagaataaggagcaggacctcgaagtgatcttacacaatggggcttgcagccctggcgctcgccaaggatgcatgaaatcgatcgaggtgaaacattctgcactgagcgtcgaactgcacagtgacatggaagtgacggttaatgggagacttgtgagtgtcccgtatgtcggcggcaatatggaagtgaacgtctacggcgcgataatgcatgaagtgcgcttcaaccacctaggtcacatattcacttttactccccagaacaatgaattccagctgcagctaagccccaaaaccttcgccagcaaaacctatgggctttgtggtatctgtgacgagaacggcgccaatgacttcatgctgagagacggtacggtcactacagattggaaaactttggtgcaggaatggacggttcagcgccccggacaaacctgccagcccattttagaagagcagtgtctggttccagattcatctcattgtcaggtgctgctcctgcccctgtttgccgaatgccacaaagtgctggcccccgccaccttttacgcgatctgccagcaggacagctgccaccaggagcaggtatgcgaggtgattgccagctatgcccatctgtgtcgcacgaatggcgtctgcgtagactggagaacccccgacttctgcgccatgagttgcccgccgtccctcgtttacaaccactgtgagcacgggtgcccacgccattgcgacgggaacgtctcctcatgcggagatcacccctccgaggggtgcttctgcccaccagacaaagtcatgctggaagggtcgtgcgtgccggaggaggcctgtacacagtgcatcggtgaggacggagtgcagcaccagttcttagaggcctgggtgccagaccatcagccatgccagatttgcacctgcctctcgggccgcaaggtgaactgtacaacgcagccttgtcctacggctaaggcccctacatgtgggctctgcgaggttgccaggctgcggcagaacgcagatcaatgttgtcctgagtacgaatgcgtttgtgaccctgtgtcctgtgatttgccccctgttccccactgcgagagaggcctgcaaccaaccctcacgaaccctggagagtgccgccccaacttcacatgcgcttgtaggaaagaggagtgcaaacgggtatcacctccctcttgcccacctcataggctgcccactttacgcaagactcagtgttgcgatgaatacgagtgtgcttgtaattgcgtgaacagtacggtcagctgtcccctggggtaccttgccagcacagctacaaatgactgcgggtgcacgacgacaacctgtctgccagataaggtgtgtgtccacagatctactatctacccagtcggacagttctgggaggaagggtgtgacgtctgtacctgcaccgatatggaggacgctgtgatggggcttcgagttgctcagtgctcacagaaaccatgtgaggactcttgccgctccggcttcacatacgtcttgcatgaaggggagtgttgtgggcgttgtcttccatccgcctgcgaagtcgtcacaggttctccacgaggggacagccagtcatcttggaagtcggtcggaagtcagtgggccagcccggagaatccttgcctgatcaacgagtgcgtgcgtgtgaaagaagaggtgttcatacagcagcggaacgtttcttgtccacaattggaggtgccagtttgcccatcagggttccagctctcatgtaaaacttcggcatgttgcccctcctgccgctgtgaaagaatggaggcctgcatgttaaatgggaccgtgatcggacctgggaaaaccgtgatgatagacgtatgcaccacctgcaggtgtatggtacaggtcggggtgatctctggttttaaattagagtgccgcaagaccacatgtaacccatgtcctctcggttacaaggaggagaacaacactggagaatgctgcggtaggtgcctccccacagcttgtacaattcagctgagaggaggacaaatcatgacactcaagagagacgagacactgcaggatggctgcgatactcacttttgcaaagtcaacgagaggggcgagtacttttgggaaaaacgcgtgaccggctgcccaccatttgatgaacacaaatgtctggccgaaggagggaaaattatgaagataccaggaacgtgttgcgacacgtgtgaggaaccagagtgtaatgacataaccgccaggctgcaatacgtgaaagtgggctcctgtaaatccgaggtggaggtagacattcattattgccagggtaaatgcgcctctaaagcaatgtacagtattgatattaacgacgtccaggatcagtgctcttgctgctcacccactcgcacggagcctatgcaggttgcactgcactgcaccaacgggagtgttgtctatcatgaggtgttgaacgctatggagtgcaaatgttcacccagaaaatgtagtaaa

SEQ ID NO: 21379 - DNA, 8439 bp, synthetic construct
  misc_feature 1..8439: note = source = /note="Description of Artificial Sequence: Synthetic coding sequence"
  source 1..8439: mol_type = other DNA
atgatccctgctagatttgcaggtgtactgctggcgcttgctctgattttgcctggcactctgtgcgcagaaggaactcgtggccgctcctccaccgctagatgttccctgttcggctcagacttcgtcaacacctttgatggcagtatgtactccttcgccggatattgtagctacctgcttgctggcggctgccagaaaaggtcattctctataatcggcgacttccagaatggaaagagagtgtctttgtccgtgtacctgggagagtttttcgacatccatctgtttgtcaacggtactgttacacagggcgatcagcgagtgagcatgccgtacgcatctaaagggttatacctggaaaccgaggcaggatattacaagctttctggtgaggcctatggtttcgtggctcgcattgatggaagtggcaactttcaggtgttgctgagcgatagatactttaacaaaacctgcggcctctgcggcaactttaacatctttgcagaagacgacttcatgacgcaagaaggcactcttacaagcgacccttacgactttgccaactcatgggcactcagctcaggggaacagtggtgcgagagagcatccccacctagctcttcatgtaacatttccagcggagaaatgcagaaaggcctgtgggagcaatgccaactactgaaaagcacctctgttttcgcacgctgtcaccctcttgttgatcccgagccgttcgtcgcactatgcgagaagaccctgtgcgaatgcgctggcggtctggaatgtgcttgccccgctttgcttgagtacgctcgaacatgcgctcaggaaggaatggtgctctatgggtggactgaccatagcgcgtgcagccctgtctgccccgctggaatggaatatcgccaatgtgtctccccatgtgccagaacctgccagagtctgcacatcaatgaaatgtgccaggagcgttgtgtggatggttgcagttgcccagaagggcaacttcttgatgagggactgtgtgtggaatcgactgagtgtccgtgcgtacacagcggcaagcgttacccacctggtacctccctgtcgcgggattgcaatacatgcatctgcagaaacagccagtggatttgttccaacgaagagtgtccaggagagtgcctggtcacaggacagtcacacttcaaaagctttgataacaggtactttacattttctggtatttgtcagtacctcctggctcgcgactgccaagaccactccttctccattgtcattgaaactgtgcagtgtgccgatgacagagacgccgtgtgcacgcgaagtgtgacggttcgcctgccaggactgcacaacagtctagtcaagctcaaacatggagctggggtcgctatggatggccaggacgtgcagttacctctgcttaagggggatttgagaattcagcatacagtcaccgctagcgtgaggctcagctatggagaggatcttcaaatggactgggacggacgcggcagactacttgtaaagttatccccagtgtacgcaggaaagacttgcggattatgtggaaactataacgggaaccagggggacgatttcctgactccatcggggctggcggaaccaagggtggaagatttcggaaacgcctggaaattgcatggcgattgccaagacctgcagaagcagcacagtgatccttgtgcattgaatccacggatgactaggttctctgaggaggcttgcgccgttcttactagcccaacctttgaggcatgccatagagccgtcagcccgcttccatatctccgcaactgtagatatgatgtttgctcatgttcagatggccgggagtgcctctgcggtgcactggcttcttacgcagctgcttgcgcaggtcgtggggttagagtcgcatggagagagcccggtagatgtgagctgaactgcccaaaagggcaggtgtacttgcagtgtggcacaccatgcaacctcacctgccgaagcttaagctaccccgacgaagaatgcaacgaagcctgtttggagggttgtttctgtcctcctgggttgtacatggacgagcgcggggactgcgtccctaaggcacagtgtccgtgctattacgacggcgaaatattccaacctgaggacatcttcagcgatcaccacaccatgtgttactgcgaggacggtttcatgcactgcaccatgagtggcgtcccaggcagcctgcttcccgatgctgttttgtcctcccctctgtcacacaggtcaaaaaggtctttatcctgcaggccccccatggtgaagctagtgtgtcccgctgacaacctgcgcgctgaggggctggaatgcactaaaacttgccagaactacgacctggagtgtatgtccatggggtgcgtgtcaggatgcctttgtcctccgggtatggtgaggcacgagaacaggtgtgtagccctggagagatgcccatgctttcatcaggggaaagagtacgctcccggcgagactgttaagattggctgtaacacctgcgtctgccaggacaggaaatggaattgtaccgaccacgtgtgcgacgctacatgctccaccatcggcatggcacactatttaacattcgatgggcttaagtatctgttcccaggagagtgccaatacgtcctggttcaagattactgtggttcaaatcctggaacctttcggatcttagttggaaacaagggttgttcacatcctagtgttaagtgcaaaaagcgcgtcacgatcttggtggagggtggagagatcgagctttttgacggagaggtgaatgttaaaaggccaatgaaagatgaaactcatttcgaagtagtagagagtggaagatatattatactgctgttgggcaaggccttgagcgtcgtctgggatagacacctgtccatatctgtcgtgctgaagcaaacatatcaggaaaaagtgtgcgggctttgcggcaattttgacggaattcagaacaacgatcttaccagctctaatctacaggtggaagaagaccccgtcgacttcggaaatagctggaaagtctccagtcagtgcgctgatacaagaaaggtgcccttggactcatcacctgccacttgtcataataatatcatgaagcagaccatggtcgatagctcctgtcgcatcctgactagcgatgtcttccaggactgcaacaaactggtggaccctgaaccatatctggatgtgtgcatctatgatacctgcagctgcgaatctatcggtgattgtgcgtgcttctgcgacaccatagctgcatatgcgcacgtatgtgcccagcacgggaaagtggtcacttggaggacagccacactgtgtccacaatcttgcgaggagaggaatctgagggaaaatggctacgagtgtgaatggagatacaacagctgcgctcctgcgtgtcaggtgacttgccaacacccagagcctctggcctgcccagtacagtgcgttgagggctgtcatgctcattgcccgccagggaaaatcctggatgagttactccagacatgtgtggacccagaggactgtccggtttgcgaggtagctggaaggaggtttgcttcgggtaaaaaggtgactcttaacccatcagacccagagcactgccaaatctgccattgcgatgtggtcaaccttacgtgcgaagcttgccaggagcccggcggtcttgtcgtgccacccacggacgctccagtgagccctacaactctctacgtcgaggatatatcggagccacctcttcatgacttttactgcagcagactgctcgatcttgtctttctactggacgggagctctcggctcagtgaggctgaattcgaagtcctgaaagccttcgtcgtggatatgatggagcggttaaggatcagtcaaaagtgggtacgggtggccgtggtcgagtaccacgatggatctcacgcatacatcggtcttaaggaccgtaagagacctagtgagctgagaaggatcgcaagccaggtcaaatacgctgggagtcaggtcgccagcacatctgaggtcttgaagtatacattgtttcaaattttctccaaaatcgacaggcctgaagcttcaagaatcaccctgcttctcatggcttctcaagaaccacagcggatgagtagaaactttgtgaggtacgttcaaggcttgaaaaaaaagaaggtcattgttataccagtgggaattggacctcatgctaacttgaaacaaataagactgatcgaaaagcaagcaccagaaaacaaagcttttgtactatcttcggtcgatgagctggaacagcaaagggatgaaatcgtctcttatctgtgcgatctggctccggaggcaccaccaccaaccctcccaccggatatggcccaggtgaccgtcggacccggccttctgggagtatccacattgggacctaaaaggaactctatggtgcttgatgtcgcctttgttctggagggatctgataaaatcggggaggccgattttaatcgctcaaaagaatttatggaagaggttatccagcgcatggatgtcggccaggactctatccatgtcacagtgcttcaatactcttatatggttactgtagaatacccgttttctgaggctcaatccaagggcgatatcctgcagcgcgtgcgcgaaatcaggtaccagggcggcaacaggaccaacacaggactggctctcaggtacctgagcgaccattctttcctggtgagccaaggcgacagagagcaggcgccaaacctcgtctacatggtcaccggaaacccagcctcagatgaaattaagcggcttcctggcgacatccaagtagtgccgatcggcgtcggcccgaatgctaatgtccaagaactggaacgtataggatggccaaacgctcctatcttgatccaggacttcgaaacccttccaagggaggctccagacctggtactgcaacgctgctgttccggtgaaggtctccaaatcccaactcttagccctgctccagattgctcccaacctctagacgtgatcttattgcttgatggctcgtccagcttcccagcaagctattttgatgagatgaagagctttgctaaggctttcatctctaaggcaaatatcggaccccgtctcacccaggtctctgtgcttcagtatggaagcattacaactatcgacgttccatggaacgtcgttcccgagaaagcccatcttctttccctggtcgatgtgatgcagagagagggaggtcccagccaaattggtgatgcactgggctttgctgtccgctacctaacaagcgagatgcacggcgcccgccctggagcttccaaagccgtggtgattctggttaccgatgttagcgtggatagcgtggacgctgccgctgacgccgctaggtcaaatagggtgaccgtctttcctatcggaatcggggataggtacgatgcagctcagttgaggatcctggcaggaccagccggcgacagcaacgtcgtgaagcttcagcgcatagaagacttgccaaccatggtcacgctcggcaatagcttcctgcataagctgtgcagcggatttgttcgcatctgcatggatgaggatggcaatgagaaacgtcccggagacgtgtggacacttcctgatcaatgtcacacagtgacctgccaaccagatggccaaaccctgctgaagtctcacagggtcaactgtgacaggggtttgaggccatcttgtcccaatagccaatcccccgtgaaagtggaggagacttgcggttgcagatggacctgcccttgtgtctgcactgggagtagcaccaggcatatcgtgacctttgacggccagaatttcaaacttaccggttcttgtagctatgtgctgttccaaaacaaggagcaagatcttgaggttattctgcacaatggtgcttgttcacccggcgctcgacagggctgtatgaaatccatcgaggtcaagcatagcgctttatcagtcgagctgcactccgacatggaagttacagtcaacggaagattagtcagtgtcccttacgtgggcggcaacatggaggtgaacgtctatggtgcaatcatgcacgaggtgcggttcaaccatctgggacacatctttactttcaccccgcaaaacaacgaattccagctgcagctgagtcctaaaacattcgctagcaaaacatatggtctgtgcggcatctgcgacgaaaacggtgccaacgatttcatgctcagagacggaactgtgaccacagactggaaaaccctggtccaggagtggactgtgcagcggcctggacagacttgccaaccaatactagaggaacagtgccttgtccccgacagctcacactgtcaggtgctgctgctgccactgttcgccgaatgccacaaggtactggcccctgcaactttctatgcaatctgccagcaagatagctgccaccaggagcaggtctgtgaagttatcgccagctatgctcatctgtgtagaaccaatggtgtgtgcgtcgattggcggactcctgatttttgcgctatgagctgccctccctctctggtctataatcactgcgagcacggctgccctagacattgtgacggtaacgtaagttcttgcggagatcacccatccgagggttgcttctgccctcctgacaaggtgatgctagagggctcatgcgtcccagaagaggcctgcacccagtgcatcggcgaggacggggtgcagcatcagtttttagaagcatgggtgccagaccaccagccatgtcaaatatgcacatgcttaagcggccgcaaggtgaattgcactacccagccctgccctacagccaaggcccccacctgcgggctatgcgaggtggctagactgcgacagaatgctgatcaatgttgccctgagtacgagtgtgtttgcgaccccgtttcatgcgaccttccacctgtgccacactgcgaacggggtctgcaaccgaccctcacaaaccctggtgaatgcagacctaactttacttgtgcttgcaggaaggaggaatgcaaacgagtcagcccccctagctgcccaccacacaggctgcctactctgcgaaagacccaatgctgtgacgaatacgagtgtgcctgcaattgcgtgaattccaccgtctcatgcccattgggctatttggcatcgacagccacgaacgactgtggatgcactaccactacctgtcttcccgataaggtgtgtgtgcataggtccactatctatccagtgggacagttctgggaggagggctgtgatgtgtgcacttgcaccgacatggaagacgcagtgatgggattgcgtgtggcacaatgcagccaaaaaccttgcgaagactcatgtagatcaggtttcacctatgtcctacacgaaggagagtgctgtggtaggtgcttgccgtcggcatgcgaagtagtaaccgggagccctagaggagacagccagagttcttggaaatcagttgggagccaatgggcatcccctgagaacccatgtttaattaatgaatgcgtgagagtgaaggaggaggtgttcatccagcagcgaaatgtgagctgcccacagctggaagtgcccgtgtgtccaagcggcttccaactctcgtgtaagaccagtgcttgctgtcctagctgtcggtgcgagcggatggaggcctgtatgctcaacggaaccgtaatcgggccaggaaagacagtaatgatcgatgtctgcaccacatgcaggtgcatggttcaggttggagtcatcagtggatttaagctggaatgccgtaagacaacctgcaacccctgtccccttggctacaaagaagagaacaacactggggaatgctgcggtcgctgcctgccgaccgcctgcaccatacaacttcgcggaggtcaaatcatgactcttaaacgggatgagaccttgcaagatggctgcgatacccacttttgcaaagtaaacgagaggggtgaatatttctgggagaagcgcgtgaccgggtgcccaccctttgatgaacacaagtgccttgctgagggaggaaagatcatgaaaattcccggaacctgttgtgacacatgcgaggagccggagtgtaacgatattacagccaggctgcagtatgtgaaagttggaagttgtaagtccgaggtggaagtggacatccactactgtcaaggaaaatgcgcctctaaagctatgtacagcatcgacatcaacgacgtgcaagatcagtgctcttgctgttcccctactcgcaccgaaccaatgcaagttgctctgcactgcacaaacggctctgtggtctaccatgaagtgctgaatgctatggagtgcaaatgcagtcccagaaagtgttctaag

SEQ ID NO: 21380 - DNA, 8439 bp, synthetic construct
  misc_feature 1..8439: note = source = /note="Description of Artificial Sequence: Synthetic coding sequence"
  source 1..8439: mol_type = other DNA
atgataccagcacgcttcgctggtgttcttttggctttggccttgattctgcccggtactctctgtgccgagggcaccagaggccgctcctcaactgctcgctgttcactttttggctcagacttcgttaatacgttcgatggttccatgtactcatttgcgggatactgctcctacctgcttgcaggtggttgccagaagagatcctttagcattatcggcgactttcaaaatggcaagagggtttcactgagtgtatatctcggcgagttcttcgatatccatctctttgtcaacggaaccgtcactcaaggtgatcagagagtctccatgccctatgcgtccaagggactgtatctggagaccgaagccggttactacaaattgtcaggcgaagcttatggtttcgtcgctcgcatcgacggaagcggtaacttccaggtcctgctgtctgaccgctacttcaacaagacttgcggtctgtgtggtaatttcaacatctttgctgaagatgatttcatgacgcaggagggtactctgacctcagatccctacgatttcgcgaactcctgggctctttccagcggagagcagtggtgtgagagagcttcacctccttccagctcctgcaatatttcttctggcgaaatgcagaagggcctttgggaacaatgccagctcctgaagtccacatccgtgttcgctagatgtcaccccttggtcgacccagagccttttgtggccctgtgtgaaaagacactctgcgagtgcgctggtggcctggagtgtgcctgtccagctcttctggaatacgccaggacttgcgcacaggagggcatggtcctgtatggctggaccgatcactccgcctgttctccggtatgcccggccggtatggagtacaggcaatgcgtcagcccgtgcgctcgcacatgtcagtcactccacattaacgaaatgtgccaggagaggtgcgttgatggatgctcctgcccagaaggtcagcttttggatgagggactgtgcgtggagtccaccgaatgcccgtgcgtccactccggaaagcgctacccccccggaacatctctgtccagggactgcaatacatgtatctgccgcaacagtcaatggatctgttctaacgaggaatgtcccggcgaatgtttggtcactggacagtctcacttcaagagtttcgacaacaggtactttacattcagcggcatctgtcagtacctgctcgccagagattgtcaggaccacagtttcagcatcgtgatcgagaccgtgcagtgcgcagatgatagagacgcggtttgtacgcgcagcgttactgtccgcctgcctggcctgcataatagtcttgttaagctgaagcacggcgcaggcgtcgccatggacggacaggatgtgcagcttccccttttgaaaggcgatctgaggattcagcacactgtaaccgcttcagtacgcttgtcatacggcgaggatcttcaaatggattgggatggccgcggcagactgctggtgaagctctctcctgtctacgcaggcaagacatgcggcttgtgcggcaattacaatggcaatcagggtgacgattttctcactccctccggacttgcagaaccccgcgttgaagacttcggaaacgcctggaaactgcatggcgactgtcaggatctgcagaagcagcattccgacccctgtgcgctgaaccctaggatgaccaggttctccgaagaggcttgcgccgtgctcacttcacccacattcgaggcttgtcaccgcgctgtgtccccactgccctatctcaggaactgtagatacgacgtatgctcatgtagtgatggcagggaatgtctttgtggcgccctggcctcttatgcggccgcatgcgcaggtagaggagtgagggtggcctggcgcgaacctggtagatgtgaactcaattgtcccaagggtcaggtataccttcaatgcggtacgccctgcaatctcacctgtaggtccctttcttatcccgatgaggaatgtaatgaagcctgcctcgagggttgcttctgtccacctggcttgtatatggatgagcgcggcgactgcgtccccaaagcgcagtgtccgtgttactacgatggtgaaatttttcagcctgaggacattttctccgatcaccacaccatgtgttactgcgaggacggattcatgcactgtactatgagcggtgtccccggctcattgcttcccgacgccgtactgagctctcctctgtctcatcgctctaaaaggtctctgagttgccgccctcccatggttaagctggtttgtcctgccgataatctgagagcggaaggtctcgaatgcacaaagacctgccaaaattacgatttggagtgcatgtctatgggatgcgttagtggttgtctctgtcctccgggaatggtgaggcacgagaacaggtgcgttgccctggagagatgcccctgtttccaccaaggtaaggaatatgcgcctggtgagactgtcaagataggctgcaacacatgtgtgtgccaggacagaaagtggaactgtactgaccatgtctgcgatgctacctgcagcacaatcggtatggcgcactacttgacattcgatggactgaaatatttgtttccaggtgagtgccagtatgtgctggtgcaagattattgtggcagcaaccctggaacctttcgcattttggtcggtaataagggttgcagtcaccccagtgtgaagtgcaaaaaaagggtgacaatcctggtcgaaggcggcgagatcgagctgtttgatggagaggttaacgtgaagaggcccatgaaggacgagacgcacttcgaagtcgtggagtctggcagatacatcatcctcctgctcggaaaggcgctctcagtagtttgggaccgccacctgagcatcagtgtggtcttgaaacagacctatcaagagaaggtctgcggtttgtgtggaaatttcgacggcatccaaaataatgacctcacttcctctaacttgcaggtcgaggaggatcctgttgattttggaaattcctggaaagtgagtagccagtgcgcggacacgagaaaggttcctttggacagtagcccagcgacttgccacaataacataatgaaacagacgatggtggattcctcttgcaggatcctcacttccgacgtcttccaggattgtaacaaattggtggacccagagccttacttggacgtctgcatttacgatacatgctcatgcgaatccatcggtgattgcgcatgtttttgtgacaccatcgcggcctacgctcacgtgtgcgcacagcacggtaaagttgttacctggaggacagctactctttgcccacaatcctgcgaagagcgcaacctgcgcgaaaacggatatgagtgcgagtggcgctacaactcatgcgctccagcgtgtcaggtaacttgtcaacacccagaacctctcgcctgtccggtgcagtgcgtagaaggttgccacgcacactgtcctcccggaaagatactggatgagctgttgcaaacctgcgtggatcccgaagactgccctgtgtgcgaggtggcgggccgcagatttgccagtggtaagaaggtgacattgaatccatctgatcccgaacattgtcagatctgtcactgtgatgtcgtgaacctcacttgtgaagcatgtcaggaaccaggcggactcgtggtgccacccacagacgcaccagtttctccaacaacgctgtacgtggaggacatcagcgagccccccttgcacgatttctactgtagccgcttgctcgatctggtctttctgctcgacggctctagtaggctgagtgaggcggagttcgaagtgctgaaggcgttcgtcgtcgacatgatggaaaggctccgcatcagtcaaaagtgggtaagggtggccgtggtggagtatcacgacggttctcatgcctatattggcctcaaagataggaaaaggccctccgaattgaggcgcatcgccagccaggttaagtacgctggatctcaggtggccagcacatccgaagtactcaaatatactctgtttcaaatattttccaaaatcgatcgccctgaagccagtcgcatcacccttctcctgatggcctcccaagagccccaaagaatgagtagaaacttcgtgagatatgttcagggactgaagaagaaaaaagtgatagtcatcccggtgggcatcggtcctcacgccaatttgaaacagatccgcctgattgaaaaacaagcccccgagaacaaggcgttcgtgctgtcttcagttgacgagttggagcaacagcgcgacgagattgtcagctatctgtgtgatctcgctccagaagccccccctccgactctgccgccagacatggcccaggtgactgtgggacccggattgctgggtgtcagcaccctgggccctaagcgcaactctatggttcttgacgtcgctttcgtgctggaaggcagtgataagattggagaagcagattttaacaggtctaaagagttcatggaggaggtgattcagaggatggatgtgggccaagattcaatccatgtgacagtactgcaatactcttatatggtaaccgtggaatatccgttcagcgaggctcaatcaaagggcgacattctgcagagggtcagagagatcaggtatcagggaggaaatcgcactaacactggactcgccctcaggtacctttccgatcattcatttcttgtgtcccagggagacagggaacaggcccctaacctcgtttacatggtaactggcaaccctgctagcgatgagattaaaaggttgccgggcgacattcaggttgtgccgattggcgtcggccccaacgccaatgtgcaggagttggaacgcatcggatggcctaatgcaccgatcctgatacaggactttgagactttgccacgcgaggctcctgacctcgtcttgcagagatgctgtagcggagagggattgcagataccaacactgtcacctgcacctgactgcagccagccattggacgtgatcctcttgctggacggttcatcttccttccccgcgtcatactttgacgaaatgaaatcctttgcaaaagctttcattagtaaagccaacattggacctcgccttacacaggtgagtgtactgcagtatggttctataacgacaatcgacgtgccctggaatgtggtccctgagaaggcccatctcctctctcttgtggatgtgatgcagcgcgagggcggaccctcacaaatcggtgacgctctgggcttcgcagtgcgctatctcacaagcgaaatgcacggcgcaaggcctggcgcttctaaagctgtcgtcatcctcgtcactgacgtgtcagtggactccgtagacgctgctgctgatgccgccaggtccaacagggtcaccgttttccctatcggaatcggtgacaggtatgacgcagctcagctcaggatcttggccggccctgctggagattcaaacgtggtgaagctccagagaattgaagacttgcccacgatggttaccctcggaaacagttttctgcacaagctctgcagtggatttgtcagaatctgtatggacgaggatggtaacgagaagcgcccgggagacgtgtggacactcccagatcagtgccacacagtgacttgccaacccgatggccagaccctccttaagtcccatagggttaactgcgacagaggtctgaggccttcatgccccaatagtcagagtcccgtgaaggtggaggagacttgcggctgtcgctggacctgcccctgcgtttgcaccggcagttccactaggcacatcgttactttcgacggacagaatttcaagttgactggctcttgttcttacgtactcttccaaaataaagaacaagatctggaagtgattcttcataatggcgcctgctctcctggcgcaagacagggatgtatgaaaagcatagaggttaagcacagcgcactgtcagtggaactgcattcagatatggaagtgaccgtcaatggtagactcgtaagcgtcccctacgtgggtggaaacatggaggtaaatgtgtatggcgcaatcatgcacgaagttaggttcaatcacctgggtcacatcttcacctttactcctcagaataacgagtttcagctgcaactgagccccaagactttcgctagcaagacgtatggactgtgtggaatttgcgatgagaatggcgcgaacgacttcatgctgcgcgatggaacggtgaccactgactggaaaactctggtccaggagtggactgttcaaaggccaggtcaaacctgccaacctatcctcgaggagcaatgtctcgtgcccgattcatctcattgccaggtactgctccttccactgttcgccgaatgtcacaaggtactggctccagccactttctacgccatctgtcaacaggacagctgtcatcaggagcaggtgtgtgaggtaattgccagttacgctcacctgtgcaggacgaacggagtttgcgtggattggcgcactccagatttctgcgccatgtcttgccccccatccctcgtgtacaaccactgtgaacatggttgcccaagacattgcgacggaaacgtttcttcatgcggagatcatccaagtgagggttgtttctgcccacccgacaaggtcatgctcgaaggcagttgcgtgcccgaggaggcttgtactcagtgtattggcgaagacggagtgcaacatcagttcttggaggcctgggtcccagatcaccagccctgtcagatctgtacctgtttgtctggtagaaaagtcaattgtacgactcaaccctgccccactgcgaaggcccccacctgcggtctgtgtgaggtcgcaagactcagacaaaacgccgatcagtgctgtcccgaatacgagtgcgtgtgcgatccggtgtcttgtgatcttcctccagtgccgcactgcgaaaggggactccagcccactttgaccaatccaggcgagtgccgcccgaactttacctgcgcttgcagaaaggaagagtgtaaacgcgtctccccccctagctgcccccctcacaggctcccaaccttgcgcaaaacgcagtgctgcgatgaatacgaatgtgcttgcaattgcgttaactccaccgtttcttgtccacttggatacctggccagtacagccacaaacgactgtggatgtaccactactacctgcttgcctgacaaggtttgcgtgcaccgcagcacgatctatccggtcggtcagttctgggaagagggctgcgacgtgtgcacgtgcaccgacatggaggatgccgtgatgggcctgagagtggcacagtgtagccagaagccctgcgaagacagttgcaggagtggtttcacatatgtcctgcacgagggtgagtgttgtggtaggtgtctgccgtcagcatgtgaggttgtaaccggttctcccagaggtgacagtcagagctcttggaagtctgtgggctcacaatgggcgtcacccgagaatccttgcctcattaatgaatgtgtaagagttaaggaagaggtcttcatccaacagagaaacgtttcatgccctcaacttgaggtcccggtctgtccctctggcttccagttgagctgcaagacgagcgcgtgctgtccaagttgccgctgcgaacgcatggaggcttgtatgctgaatggcaccgtgatcggtcccggcaagaccgtaatgatcgatgtgtgtacaacttgtagatgtatggttcaagtcggcgtcatcagcggcttcaagctggaatgccgcaaaacaacttgtaatccgtgtccgctgggctataaagaggaaaacaacaccggcgaatgttgtggtaggtgcttgcccaccgcatgcactatccaactgagaggcggacaaatcatgacccttaaaagagacgagacattgcaggacggctgtgatactcatttttgtaaggtgaacgagagaggtgagtatttctgggagaagcgcgtgaccggctgccctccgtttgacgagcacaagtgcctcgccgagggcggcaaaatcatgaaaattccaggcacctgctgcgacacctgtgaggagcccgagtgtaatgacatcactgccaggctgcagtatgtaaaggttggctcctgcaaatccgaagtcgaagtggacatccactattgccagggtaaatgcgccagcaaggcaatgtactccatcgacatcaacgacgtacaagatcagtgctcttgctgctcacctaccaggaccgaaccaatgcaggtggccctccactgcaccaatggatctgttgtgtaccacgaagtgttgaacgctatggagtgtaaatgcagcccaaggaaatgcagcaaa

SEQ ID NO: 21381 - DNA, 8439 bp, synthetic construct
  misc_feature 1..8439: note = source = /note="Description of Artificial Sequence: Synthetic coding sequence"
  source 1..8439: mol_type = other DNA
atgatcccagccagattcgccggtgttctcctcgcgttggcattgatcttgcccgggactctttgcgctgaaggaacaagagggagaagctctacagcccggtgctccctatttgggtcagactttgtcaacacgttcgacggctctatgtatagctttgcagggtattgttcctacttgttggctggagggtgtcagaaacgctcattttctattatcggtgacttccagaacggaaagcgagtgtctctgtccgtgtatctgggtgaattttttgacattcacttgttcgttaacggaaccgtaacacaaggagaccagcgagtatccatgccatatgcctccaagggcttatacctggagacagaggctggttattataaattgtctggggaagcttacgggttcgtagcacggattgatggctctggaaacttccaagtcctactctcagacaggtatttcaacaagacatgcgggctctgtgggaactttaacatattcgcggaggatgacttcatgacgcaggaaggtacacttacctccgacccttatgacttcgctaattcctgggcactgagctctggcgaacagtggtgtgaaagggcaagccccccctcatcatcctgtaacatctctagcggcgaaatgcaaaaaggcttgtgggaacaatgccagctactaaagtctaccagtgttttcgcccgttgtcaccccctcgtggaccctgaacccttcgtggctctgtgtgagaagacattgtgtgaatgtgctggtggacttgaatgtgcttgtcccgcactgcttgagtatgctcggacctgtgcccaggagggcatggtcctatacggatggacagaccacagcgcctgtagtcccgtatgccccgccggaatggaataccgtcagtgcgtgagtccttgcgctaggacttgccagtcactgcatatcaacgaaatgtgtcaggaacgatgtgtggatggatgttcatgtcctgaaggtcaactgcttgacgagggactctgtgtagagagcacggaatgcccctgcgttcactccgggaaacgctaccccccaggcacatccctttctcgggactgcaacacatgcatctgccgcaactcacagtggatttgctccaatgaggaatgccctggagagtgtttggtcacaggacagagtcattttaaatctttcgataaccggtacttcaccttctcaggcatatgccagtacctgctggccagggattgccaggatcactctttttctattgttattgagaccgtgcagtgcgcagacgacagagatgcagtttgcacgcgatctgttactgtacggttgccaggtcttcacaactcactcgtgaagctgaaacatggcgccggcgtggcaatggatgggcaggatgtacagttgccgctgctcaagggggacttgaggatccaacacactgtaaccgccagtgtgcgattgtcctatggcgaggacttacagatggactgggatggccggggacgtttgctcgtcaaactaagccccgtgtatgctggtaagacctgcggcctgtgtggcaactacaacggcaaccagggggacgatttcttgacaccttccggactagccgagccacgggttgaggactttggtaatgcctggaagttgcatggggattgccaggacctccagaaacagcacagcgatccgtgtgctctgaaccccaggatgacaaggttcagtgaagaggcatgcgccgtgctcacatcgccgacctttgaggcctgccacagagcagtgtccccactcccatacctgcgtaactgtcggtatgacgtgtgttcatgtagtgatggtcgcgagtgtctgtgcggtgccctcgcctcctatgccgctgcctgtgcaggtcggggagttagggtcgcctggagggagcccggtagatgcgaactgaattgtcctaaggggcaggtgtacttacagtgcggaacgccctgcaaccttacatgcaggagcctaagttacccggacgaggaatgcaacgaggcatgtctcgagggctgtttttgcccgcctggtctgtacatggatgaacgaggcgattgcgtcccaaaagcacagtgtccatgctactatgacggggagatttttcagccagaggacatcttctccgatcaccacacaatgtgctactgtgaggacgggtttatgcattgtactatgtcaggggtgccagggtccctcttacctgacgcggtccttagcagccccttgagccaccggagcaagcggtccctcagctgtagacccccaatggtaaaacttgtgtgccctgctgataaccttcgcgccgagggtctcgaatgcaccaagacctgtcagaactatgacctggagtgcatgtccatggggtgtgtctccggctgtctgtgccccccagggatggtcaggcatgagaaccgatgtgtcgcacttgagagatgcccgtgctttcaccaggggaaggagtatgcacctggcgaaacagtcaagataggatgtaacacatgcgtgtgccaagacaggaagtggaattgcaccgatcatgtctgtgacgccacgtgttcaacaatcggtatggctcactatttgaccttcgacggcctgaaatacctttttcctggcgaatgccaatacgttctcgtgcaggactactgtggctcaaatcctggtacattccggatactggtgggcaataagggctgtagccacccttcagtgaaatgtaaaaaaagggtgacgatcctggtggagggaggggaaatagagctctttgatggagaggtcaacgtaaagagaccaatgaaagacgagacacacttcgaagtagtggaaagcggcaggtacataattctcctgttgggcaaggccctaagtgttgtctgggatcggcatctgtcgattagcgtagtgctgaaacagacatatcaggaaaaagtttgtgggctctgtggcaactttgacggcatacagaataatgatctcacaagtagtaacctccaggtggaggaagaccccgttgacttcggcaattcttggaaagtgagtagccagtgcgctgatacaagaaaggtgcccctggacagttcccccgcgacttgtcataacaacatcatgaagcagaccatggtggatagcagttgccgcatactcacgtccgacgttttccaggattgcaataaactcgtcgatccggagccatacctggacgtatgcatctacgatacatgttcctgcgagagcatcggtgactgtgcttgcttctgtgatactatcgccgcctacgcgcacgtatgtgctcagcatggaaaggtcgtgacttggagaacagctactttgtgtccacagtcttgcgaggaacggaacctgagagaaaatgggtatgagtgtgaatggagatataacagttgcgcgcccgcgtgccaggtgacgtgtcagcatcccgaaccccttgcgtgtccagtacagtgtgtggaaggctgtcatgcacattgtccacccggtaagatccttgatgagcttctgcaaacttgtgttgacccggaggattgtccggtgtgcgaggtggcggggcgcagatttgctagcgggaagaaagtaacactgaaccccagcgacccagaacactgtcaaatctgtcactgcgatgtggtaaaccttacctgcgaggcttgtcaggagccaggcggcctggttgtgcctcctacggacgccccagtatcccctaccacactctacgtagaagacatcagtgagccacctctccatgatttctactgttcgagactgcttgatttggtgttcttgttggacgggtcctctaggttatccgaggccgagttcgaggtgctgaaagcttttgtcgtagatatgatggaaagactccgcatttctcagaaatgggtcagggttgctgtggttgaataccatgacggtagccatgcctacatcggactgaaggatcgtaaaaggccctcagagctccggaggattgcaagccaggtaaagtacgctggctcccaggtagctagtacaagtgaggtgctcaagtatacgctgtttcaaatctttagcaagattgatcgtcctgaggcttcaagaatcactctgttgcttatggccagccaggagccacaacgaatgagcaggaacttcgtgaggtatgtccagggactaaagaagaagaaagtgattgtcatacctgtcggaatcggaccccacgctaacctcaagcaaatccggctgattgagaagcaggcccccgaaaacaaagcctttgtgctttcatcagttgatgagttggaacaacagagggacgagatagtgtcgtacctctgcgatctcgcccccgaggcccctccccccactttaccacctgacatggctcaagtcaccgtgggcccaggcttgctaggcgtttctacccttgggcccaaaaggaactctatggtgttagacgtggctttcgtcttggagggcagcgacaagataggcgaggccgatttcaaccggtcgaaagaatttatggaggaggtgatccagcgcatggacgtgggtcaagattcaattcatgtgaccgtgctgcagtacagctacatggtgacagtagaatatccgttcagcgaagcccagagtaaaggcgacatcctgcagcgggtgagagaaatcaggtaccagggcggcaatcgcactaacacaggactggctctgaggtacctgtctgaccactccttcttggtctcacagggtgaccgcgaacaggctcccaacctggtgtacatggttacaggcaatcctgctagcgatgagatcaaaagactgcccggggacatccaggttgtgcctataggtgtgggacccaacgcgaatgtccaggaattagaacggatcggctggccaaacgcgcccattttgatacaggactttgagactcttccgcgagaagcccctgatctggttctacagcgctgctgcagcggggaggggctgcagatccccaccctttccccagctccggattgttcccagccactcgatgtgattttgcttcttgatgggtcttcgagttttccggctagctactttgacgagatgaagagctttgcaaaagcattcatctcaaaggcaaatataggcccacggctgactcaggtctcggtgcttcaatacgggtctattacaaccatcgatgtgccttggaacgtggtcccagaaaaagcacacctgctatctttagtggacgtgatgcagcgagaaggcggccctagtcagattggggatgcgctcggtttcgcagttagatacctcacaagtgagatgcatggcgctcgacctggcgcctccaaggcggtggtcatcctggttacagacgtaagcgtggattcagtggatgctgcggctgatgcagcaaggtccaacagggtcactgtttttccgatcggcatcggcgatagatacgatgccgcccagttaagaattctagctggtccggctggggattccaatgttgtcaagcttcagcgaattgaggacttaccaacgatggtgacgctcggcaactctttcctgcacaagctgtgctcggggttcgtgagaatatgcatggatgaagacggtaacgaaaagcggcctggcgatgtttggaccctgccggatcaatgtcatactgtcacttgccagcctgatggtcagacactgctcaaaagtcatcgcgttaattgcgaccggggtctgaggccgagctgcccaaatagccagtctcctgtgaaggtggaagagacgtgtggttgcagatggacatgtccttgtgtttgtactggatcctcgactagacacattgttactttcgatggccagaacttcaaactgacagggtcatgtagctatgtgcttttccagaacaaagagcaggacctggaggtcatcttgcacaacggagcatgctccccgggagctcgtcaaggctgcatgaaaagtatcgaggtgaaacactcagcattgagcgtggagctgcactccgatatggaggtgaccgttaatggaaggttagtatcggtgccgtacgtaggcgggaatatggaagtgaacgtttacggggcaataatgcatgaagttcgctttaaccatctgggccacatttttacgttcacgccccagaataatgagttccagcttcagctgagtcccaaaacgtttgcgtcaaagacatatgggctttgcggtatctgcgacgagaatggcgctaatgacttcatgctgcgcgacgggacagtaacaactgactggaagactctggttcaggaatggactgtccagcgccccggccaaacttgccagcccatactggaggagcagtgcttggtacctgattcctctcactgtcaggtcctccttctccccctgtttgctgaatgccacaaagtcctggcacctgccaccttttatgctatatgtcaacaagacagctgtcaccaagagcaggtgtgtgaggtgatcgccagttacgcgcacctgtgccgtaccaacggtgtttgtgtggactggagaacccccgacttctgcgctatgtcgtgccctcccagcttagtgtataaccactgcgagcacggctgccctcggcactgcgacggaaacgtttcctcttgcggggatcatccatcagaggggtgtttctgtccccccgacaaggtgatgttggagggaagctgtgtgccagaggaagcgtgcactcagtgcatcggtgaagacggagtacagcaccagttcttagaagcctgggtgcccgatcaccagccatgccagatctgtacttgtttgtctgggcgcaaagtcaattgcacaacgcagccctgtcccacagccaaggctcctacatgcggcctgtgtgaggtagcacgccttaggcagaatgcagaccagtgctgtcctgaatacgagtgtgtgtgtgatccagtcagttgtgacctgcccccagtcccacattgcgaaaggggcctgcagcctacccttacgaatccaggagagtgccgaccaaattttacctgtgcgtgtcgcaaggaagagtgcaaacgagtgtcacccccaagttgtccacctcacaggttgccgaccctgcggaagacccaatgctgtgacgaatacgagtgcgcttgtaactgtgttaactctaccgtgtcttgcccactgggttaccttgcctctactgcgaccaatgactgtggctgcacaaccacgacttgtctgccagataaagtatgcgtccaccgcagcactatatatcccgtggggcagttttgggaggaggggtgcgacgtgtgtacatgcaccgatatggaagacgccgtgatggggctgcgggttgcccagtgctctcagaaaccatgcgaagacagttgcaggtccggctttacctatgttctgcatgagggggagtgttgcggcagatgcctgccgtccgcttgcgaggtggtgactggaagtccccggggcgactcacagagttcttggaagtctgttggctcccagtgggcttctcccgagaatccatgcttaattaatgagtgcgtgcgtgtaaaagaggaggtatttattcagcaacgcaacgtaagttgtccgcagcttgaggtgcctgtgtgcccctcaggctttcagctgagctgtaaaacctccgcctgctgcccatcttgtaggtgtgaacgtatggaggcatgcatgctgaatggcactgtgatcgggcctgggaagacagttatgattgacgtatgtacgacctgcaggtgtatggtgcaggttggggtaatctctggattcaaactcgagtgtcggaagaccacttgcaacccatgcccactcgggtataaagaggagaacaataccggcgagtgctgtgggcgctgtctgccaacagcatgtacaattcagctgagaggtggccagatcatgaccttgaagcgggacgagactctgcaagatgggtgcgatacccacttttgcaaggtaaatgagaggggcgagtatttttgggagaagcgcgtgacggggtgtcctccctttgacgagcacaagtgcttggccgaaggaggcaagatcatgaaaatccccggaacttgctgtgatacttgcgaggaacctgaatgcaatgatataaccgctcggctgcagtacgtcaaagtgggtagctgtaagtctgaggtcgaggtggacatccattattgtcagggcaagtgcgcaagtaaagccatgtatagcatcgacatcaatgacgttcaggaccagtgctcgtgttgttctcccacacggacagagccaatgcaggtggcactgcactgtacgaatggctcagtggtatatcacgaagtgctcaatgccatggagtgcaagtgttctcctagaaaatgctctaaa

SEQ ID NO: 21382 - DNA, 8439 bp, synthetic construct
  misc_feature 1..8439: note = source = /note="Description of Artificial Sequence: Synthetic coding sequence"
  source 1..8439: mol_type = other DNA
atgattcctgctaggttcgccggcgtgctgctggcactggcccttatcctgccgggcactctctgcgcagaggggaccagggggcgcagctctaccgcccgttgttcactgttcggctctgatttcgttaacacctttgatggttcaatgtatagcttcgcgggctattgttcatatctgctcgccggcgggtgccagaaacgtagtttctctatcattggcgattttcagaacggtaagcgagtctcattatccgtctatctaggtgagttttttgacatccacctcttcgtgaatggtaccgtaacacagggcgatcagagggttagcatgccttatgccagcaagggactgtacctggagacagaggccgggtactacaaactgtctggggaggcttacggtttcgtggcccgcattgacggctcaggcaattttcaggttctcctttccgaccggtactttaacaaaacctgcggactgtgcggtaacttcaatatcttcgccgaggacgatttcatgactcaagagggaactctgacctctgacccctatgactttgctaactcttgggccctgtcttctggggaacagtggtgtgagagagccagccctcccagttcctcatgcaacatttcatccggggaaatgcagaaggggctgtgggaacagtgccaactcctgaaaagcacatcagtgttcgcacgatgtcacccactggtcgaccccgagccattcgtagcgctctgcgagaagacgctgtgtgagtgcgcaggcggcttggagtgtgcgtgtcccgcactcctcgagtatgcgcggacctgcgcacaggaggggatggtgctatacgggtggacagaccattccgcctgttctccagtgtgccctgcgggcatggaataccgccagtgcgtgagcccatgtgcgagaacttgccagagccttcatataaacgaaatgtgtcaggaaaggtgcgtagatgggtgctcgtgtccagagggtcagttactcgatgaaggcctttgtgttgaatccaccgaatgcccatgcgtgcacagtggcaagagatatcccccaggaaccagcttgagccgggattgcaatacctgtatctgcagaaattcccagtggatatgctccaacgaggagtgcccaggtgagtgcctggtaacgggacagagccacttcaagagctttgataatcgttatttcacctttagtggcatctgtcaatacctcctcgctagggattgtcaggaccactcctttagcattgtgatcgagacagttcagtgtgctgacgatagggacgccgtctgcaccaggtctgtcacagtaaggctacctggccttcataacagtttggtgaaacttaagcacggtgcaggggttgcaatggacgggcaagacgtgcagctgcctctgctgaaaggagatcttagaatccagcacaccgtgaccgcgtctgtgcgtctgagttacggtgaagacttgcagatggattgggatgggcgtggccggttgctggtgaagctctctcctgtgtatgccggcaagacttgtggcctgtgcgggaattacaatggtaatcagggcgatgatttcttgactcccagtggtttagctgaacctcgagtagaggactttggcaacgcctggaaactgcatggcgattgtcaagatctgcagaaacagcactccgacccttgcgcccttaacccacgcatgacccgcttcagcgaggaggcttgcgcggtgttaaccagtccaaccttcgaagcttgtcaccgggccgtgtctcctctaccctacctcagaaactgtaggtacgacgtgtgcagctgcagcgacggaagagaatgcctttgcggcgctctcgcctcctacgctgcagcttgcgcagggcggggagtgcgcgtcgcttggcgcgaacccggccggtgcgagctgaattgccccaaaggccaggtctacctgcagtgtgggaccccttgtaacttgacatgccgctctctgtcctatccagatgaggagtgtaatgaggcttgcctggaaggctgtttctgccccccaggcctgtacatggacgagagaggggattgtgttcctaaagcacagtgcccctgttattatgacggggagatcttccagcccgaggatatattcagtgaccatcataccatgtgctactgcgaggacgggtttatgcactgcactatgtccggcgtgcccggctcgctcctgccagatgcggtgctcagctcccctctgagccaccgaagcaaacggagcctcagttgccggccccctatggtaaagctcgtctgccctgccgacaacctccgcgccgagggcctagaatgcactaagacttgccagaattacgatctggaatgcatgtccatggggtgtgtctcagggtgtctttgccctcccggtatggtccgccacgaaaaccggtgcgtcgcactggaaagatgtccgtgctttcatcagggaaaggagtatgcgcccggagagacggtgaagatcggctgcaacacttgtgtctgtcaggacagaaagtggaactgtacggatcatgtgtgcgacgccacgtgcagcacaattggcatggcgcattacctgacctttgatggcttgaaatacttgttccccggcgagtgtcaatatgttctagttcaggactattgcggttcgaatccagggactttccgcatcctggtaggcaataagggctgtagccatcccagtgtcaagtgcaaaaaacgagtgacaattttggtcgaaggcggcgagattgagctgttcgatggcgaggtgaacgtgaagaggccaatgaaggacgagacgcacttcgaagtggtcgagagtggcagatacattatactgctgctgggaaaggccttgagtgtcgtctgggacaggcacctgagtatttccgtggttctgaagcagacataccaggaaaaggtgtgcggtctgtgtggtaacttcgatgggatccagaataatgacctcacatcctccaacctgcaagtggaggaggatccagttgacttcgggaacagctggaaggtgtcatctcagtgtgcggatactcgcaaagtgcctctcgactcctcgccagccacctgtcacaataacataatgaagcagacaatggtagactccagctgtcgcattctgacctcagacgtgttccaggattgtaacaaactggtggatcccgaaccatatttggatgtgtgcatttatgacacatgcagttgcgagagcatcggagattgtgcatgtttctgtgacacgattgcagcttacgcccatgtatgtgcacagcatggtaaagtcgtgacttggcgcacggcaacactttgcccccagagctgcgaggagaggaacctgcgggaaaacggctatgagtgcgagtggcggtacaatagctgtgcccctgcttgtcaggtcacatgccagcatcccgaacccctggcctgccccgtgcagtgcgtggaagggtgtcacgcccattgcccccccgggaagatcctcgatgagctgcttcagacatgtgtcgacccagaggattgcccagtgtgcgaggtcgccggccgacgtttcgcgtctggaaaaaaagtgaccctgaatccaagtgaccctgagcactgccaaatctgtcattgtgacgtagttaacctgacctgcgaggcatgccaggaaccaggggggttggttgtcccacctactgacgccccagtgagtcctaccacgctatatgttgaagacatctcggagccaccgctgcacgacttctactgcagcagactgttggatctggtgttcctcttggatggatcctcgcgcctctcagaggccgagttcgaggtgcttaaggccttcgtggtggacatgatggaaaggctccgcattagccaaaagtgggtccgcgtggcagtggtggagtaccacgatggcagtcatgcttacattggcctcaaggatcggaagcgaccttcagagctccgccgaatcgcctctcaggtgaaatatgccgggtctcaggtggccagcacctctgaagtgctgaaatatactctctttcagatctttagcaagattgataggcccgaagccagccggattactctcctgctcatggcatcccaggagccgcagcgaatgagtagaaatttcgtgcgatatgtgcaggggttgaagaaaaaaaaggtcatcgtgattccagtgggcattggcccccatgcgaatctgaaacagattcgtcttatagaaaaacaggccccggaaaacaaagctttcgtcttatcctccgtcgacgagttggaacagcagcgagacgaaattgttagctacctgtgtgatctggccccagaggccccgcctcccacattgccacccgatatggcccaggtgactgtgggacccggcctgctcggggtctctactctgggccctaaacgtaattccatggtgttagatgttgccttcgtgctagagggttccgataagattggtgaagccgatttcaaccgcagtaaagaattcatggaggaagttatccagcgcatggacgtcggccaggactcaattcacgtgactgtgctccagtattcttatatggtcaccgtggagtaccccttcagcgaggcccagtccaagggagatatcctccaacgcgtgcgcgagattcgataccaggggggaaaccggaccaacaccggcctggcgctgagatatctgagcgatcactctttcctcgtgtctcagggcgatagggagcaggcgccgaacctggtgtatatggtgacgggcaatccagcgtccgacgaaataaaacgcctgccaggagacatacaggtggttcccatcggcgtgggccctaacgccaacgtccaggaactggagcgcatcggctggccgaatgctcctattctaatccaggacttcgaaaccctccctcgggaggcacctgatctcgtcctgcagcgctgttgctccggggagggccttcagattccaacactcagtcccgcgcccgattgctcacagcctctcgatgtgattctgctcctggacggctcctcaagcttccctgcctcttactttgatgaaatgaagtcttttgccaaggcttttattagcaaggccaatattggccctcggctgacccaggtgtctgtgcttcaatacggttccatcacaaccatcgacgtgccgtggaacgtggtgcccgaaaaagctcacctgctatctctcgtggacgtgatgcagcgagaagggggcccctcccagattggcgatgctctgggatttgccgtgcgatatctgacttccgagatgcacggtgcgaggccaggtgcttctaaggcggtggtgatcctggtgaccgatgtgtctgtggacagcgtggatgccgccgctgacgccgctcggagcaaccgagtgaccgtgttcccaataggcattggagataggtatgatgcagcacagctgcgaatcttagctggaccagccggagattcaaatgtggttaaactgcagagaattgaggacctacccactatggtcaccctgggtaattctttcctccacaaattgtgttctggtttcgtgcgaatttgtatggacgaggatgggaacgagaagcggcccggcgacgtgtggactttgcctgatcaatgtcatacggtcacatgccaacccgatggccagacgttgctgaaaagccaccgtgtcaattgtgatcgcgggctgcggcccagctgccccaactcccagtctccagtgaaagtcgaggaaacatgcggctgccgttggacctgtccatgcgtgtgcactggcagcagcacgcgccatatagtgacattcgatgggcaaaattttaaattaacaggaagctgcagctatgttttatttcagaacaaggaacaggacctggaggtgatcctgcacaacggcgcttgctccccaggcgctcggcagggctgtatgaagagtattgaggtgaaacactccgccctttccgtagaactacactccgacatggaggtgacagtgaatggccggcttgtcagcgtaccctatgtgggcggcaatatggaggtcaatgtgtacggcgcaatcatgcacgaagtcagatttaaccacttaggccatatctttacctttaccccccagaacaatgaattccagttacagttgagtccgaagacgttcgcatctaaaacatatgggttgtgcggaatctgtgatgagaatggtgccaatgactttatgttacgcgatggcaccgtcaccactgactggaagactctggtgcaagagtggaccgtgcagagaccaggccagacatgccagcccatcctcgaggaacagtgcctggtgcccgacagttctcactgtcaggtgcttctgctccctttgttcgctgagtgtcacaaggtgctcgctccggccacattttacgcaatatgtcagcaggacagttgtcaccaggaacaggtgtgcgaggtgatcgcaagttatgctcacttatgtcggacaaatggagtctgcgtggattggagaacgccagacttttgcgctatgtcatgcccccccagtttggtgtataatcactgcgagcacggttgtcccagacactgcgatggcaatgtgtcctcctgcggtgatcacccctccgagggttgtttttgccctccggataaggtcatgctcgaggggagctgcgtgccagaagaggcctgcacacaatgtataggagaagacggtgtccagcatcagttcctcgaggcatgggttccagatcaccaaccgtgtcaaatatgcacctgtctctccgggaggaaagtcaactgcaccacgcagccatgccccacggcgaaggcaccaacctgtggcttgtgcgaggttgccaggctgcggcagaacgctgatcagtgttgccctgaatatgaatgcgtgtgtgacccggtgtcctgtgacctgcccccagttccccactgcgagcgcggtctacagccgaccctgactaatcctggcgaatgccgccctaacttcacatgcgcatgcaggaaggaggagtgcaagagggtctcccccccctcctgcccaccgcaccggttgcctacacttaggaaaacgcaatgttgcgatgagtatgagtgtgcctgcaattgcgtgaattctacagtttcttgtccgctgggttacctagcctccactgccactaacgattgcggttgtacgacaacaacgtgtctgcccgacaaagtgtgcgtgcaccggtccaccatctacccggtgggccagttttgggaggaagggtgcgacgtgtgtacatgtacagatatggaggacgccgtgatgggactgcgcgtggcccagtgttcacagaaaccttgcgaagactcttgccggtcaggctttacctacgtgctgcacgagggcgagtgctgtgggcgatgcctgccttcagcctgcgaggtggtcacaggcagccctcgcggggactctcagtccagctggaagtcagtcggctcacagtgggcatcacccgagaacccctgtctgattaatgagtgcgttcgggtgaaagaggaggtatttatccagcagcgcaatgtcagctgcccacagctcgaggttcccgtctgccccagcggatttcagctctcttgtaagacgagtgcttgctgcccttcctgccgatgcgaaaggatggaggcctgtatgctaaatggtaccgtcatcggccccggtaaaaccgtgatgatcgacgtgtgtacgacttgcaggtgtatggtgcaggtgggcgtcatatccgggttcaagcttgaatgtcggaaaaccacatgcaacccatgcccactgggctacaaggaggagaacaatacaggggaatgctgtggacgctgcctgcctacggcttgcacaattcaactgcgtgggggccaaataatgacactgaaaagggacgagacgttgcaggacggatgtgatacacacttttgcaaagtcaacgaaaggggggagtacttctgggagaagcgcgtcaccggatgccctccattcgacgagcacaagtgtctggctgaagggggaaagattatgaagataccaggcacttgctgtgacacttgcgaagagcctgagtgcaacgatattaccgccagactgcagtacgttaaagttggatcctgcaagagtgaagtagaagttgatattcattattgtcaggggaaatgcgcttccaaagccatgtatagtatcgacattaacgacgtgcaagaccaatgcagttgttgctcccccaccaggactgaacctatgcaggtggctctgcactgtacaaatggtagcgtggtgtatcacgaggtgctgaatgcgatggagtgtaagtgcagccctcgcaagtgcagtaaa

SEQ ID NO: 21383 - DNA, 8439 bp, synthetic construct
  misc_feature 1..8439: note = source = /note="Description of Artificial Sequence: Synthetic coding sequence"
  source 1..8439: mol_type = other DNA
atgatccctgcaaggttcgctggcgtgctgctggccttagccctcatcctgcccggaactctctgcgctgaagggacaagaggtcgaagcagtaccgctagatgctccctgttcggatcagacttcgttaatactttcgacggtagtatgtatagctttgctggctattgttcatatctgctagctggcggctgtcagaagagatctttcagcataattggagatttccagaatggtaaacgagtttccctgagcgtttacttaggtgaattcttcgatatccatcttttcgtcaatggaaccgtgacccagggcgatcaacgagtttccatgccctatgcatccaaagggctgtatctggagaccgaggccggctattataaacttagcggcgaggcctacggctttgtggcccggatagatgggagtggtaacttccaggtgctgctgtctgataggtactttaataaaacctgtggactgtgtggtaattttaatatattcgctgaggacgattttatgacccaggagggcaccctcacttcagatccatacgatttcgccaactcctgggctctcagctccggtgaacaatggtgcgaacgggcctcccctccaagttctagctgtaacatctcctccggcgaaatgcagaaggggttatgggaacagtgtcagctcctaaaatcaacctctgttttcgcccggtgccatcccctggtggatcccgaaccatttgtggctctatgcgagaagacactgtgtgagtgtgctggcgggctggagtgcgcatgcccagccctgctggaatacgctagaacttgcgctcaggaaggaatggttctgtatggatggacagatcactctgcatgctcacccgtgtgtcccgctggcatggagtaccggcagtgcgtgagcccctgcgcaaggacttgccagagcctgcatatcaatgaaatgtgccaggagaggtgcgtggatgggtgttcctgcccagagggccagctcctggacgaaggcttatgcgtagaatccaccgagtgtccttgcgtgcactctggcaaacgatatcctcccggaacaagtctgagtcgagactgtaacacttgcatctgtcggaactcccagtggatttgctctaacgaggagtgccctggcgagtgtctggtgaccgggcagagtcacttcaagtctttcgacaatcgttatttcacattctctgggatttgtcagtacctcctagcccgcgactgccaggatcactccttctctattgttattgagacagttcaatgcgcagacgatcgggatgccgtgtgtaccaggtctgtgaccgttaggttgccaggattgcataatagcctggtcaaattgaagcacggcgccggggtcgctatggacggccaggatgtacagctgccactcctgaagggcgacttaaggatacaacacacagtgacagcctctgtccggctgagctacggcgaggatctgcagatggactgggacgggcgaggaagactgctggtgaagttgtctcccgtttatgctggcaaaacatgcggcttatgtggaaattataatggcaaccagggggatgattttctaaccccatccgggctggccgagcctcgcgtggaggatttcgggaatgcatggaagctacacggagactgccaggatctccagaagcagcattctgacccctgtgctctcaacccaaggatgacaagattttcagaggaggcctgtgctgtcctcacctcacccacattcgaggcatgccacagagctgtttcccctctaccatatctgagaaactgtcgttatgatgtgtgttcctgcagtgatgggagagagtgtctgtgcggggcactggcttcatacgcagccgcctgtgcagggaggggagtgcgtgtggcttggagggagcctgggcgatgcgagcttaactgtcccaagggtcaagtgtaccttcaatgtgggacaccttgcaatctcacttgtcgcagcctctcctatcccgatgaggagtgcaacgaggcctgcctggagggctgcttctgtccccccgggctgtatatggatgaacgaggcgattgcgtgcccaaggctcagtgcccatgctactacgacggggaaattttccagcccgaagacattttctccgatcaccataccatgtgttactgtgaggatgggtttatgcactgtacaatgtccggcgtgcctggatctctcctgcctgatgcagtgctcagcagccctctatcccaccgttctaaaaggtctctgtcttgcagaccacctatggttaagttagtctgcccagctgataacctgcgagctgaagggctagagtgtaccaaaacttgtcagaactatgatttggagtgcatgagtatgggttgcgtctctgggtgcctgtgccctcctggcatggtgcggcatgagaaccgttgcgtggcactggaaagatgcccatgtttccatcaaggcaaagagtacgctcctggcgaaaccgttaaaatcggctgcaatacctgcgtctgccaggatcgaaaatggaattgtacagatcacgtttgcgatgccacttgttcaaccataggcatggcccactacctgacattcgacggactgaagtacctgttcccaggcgagtgccagtatgtactggtccaggactattgtgggtccaaccccggcacctttagaattctagtgggaaacaagggttgcagtcacccaagcgtgaagtgtaaaaagcgcgtgaccattctggtggagggaggcgaaatcgagttatttgacggtgaggtcaatgtgaagcgtcctatgaaggacgagacccatttcgaagtggtggaatccgggaggtatattatcttgcttttggggaaggccctctctgttgtatgggatcgacatctgtccattagcgtggttcttaaacagacttatcaggaaaaagtgtgtggcttatgcggcaatttcgacgggatccagaacaatgatctgacaagcagtaatctccaggtagaggaagacccagtggactttggaaactcatggaaggtgagcagtcagtgtgctgacacaaggaaggtcccactggattcctccccagcaacatgccacaataacattatgaagcagaccatggtggacagcagctgcaggatcttaaccagcgacgtgtttcaggattgcaataagctagtcgaccccgagccatacttggacgtgtgcatttatgacacatgttcctgtgagtccataggcgattgtgcatgcttttgtgacacaatagctgcttacgcacacgtgtgcgcccagcacgggaaggttgtgacatggcgtaccgcaaccctgtgtccccagtcctgtgaggaaagaaatctgcgggagaacgggtacgagtgcgagtggcgttacaatagctgtgctcctgcatgccaggttacatgtcaacacccagagcccctggcctgccctgtacagtgtgtagaaggatgccatgcccactgccctcccggtaaaatcttagatgaactcttacagacttgcgtcgatccagaagattgccccgtgtgtgaagtggccggtcgcagattcgcctctgggaagaaggtgacactcaacccgtccgacccagagcattgtcagatttgtcactgtgacgtggtcaatctgacttgtgaggcctgtcaggaacctggcggccttgtcgtcccacctactgatgctcctgtgtccccaaccacactctacgtggaggatataagcgaacctcctctccacgacttctattgctccaggctgctggacctggtgttcctcctggacggctcatctcggttatccgaggcagaatttgaggtcttgaaggcttttgttgtcgatatgatggagaggttgcggatctctcaaaaatgggtcagagttgctgttgtcgaatatcatgacggcagtcacgcctatataggtctgaaagaccgtaaacgcccttctgaactgcggcggatagcaagccaagtgaaatatgccggctcccaggtcgcctccaccagtgaggtgctgaagtacaccctattccagattttctccaagatcgatcggccagaggccagcaggatcacactgcttttaatggccagtcaggagccccaacggatgtcaaggaacttcgtgcgctacgttcaggggttgaaaaaaaagaaagtgatcgtgataccagtcgggattgggccccatgctaatctgaagcaaattcgcttgattgagaagcaggcccctgaaaacaaggccttcgtccttagttccgttgatgaactggagcagcagagagacgagatagtgtcttatctgtgtgacttggcacccgaggctcctccgcccaccctccctcccgacatggcacaggtcaccgtgggtcccggtctgctgggggtgtccaccctgggcccaaagaggaattctatggtgctggacgtggctttcgtgttagagggcagcgataagatcggtgaggctgacttcaacaggagtaaggaatttatggaggaagtgatccagcgaatggacgttggccaggatagcatacacgttaccgttttacagtattcctatatggtgactgtcgaatacccattcagcgaggcccagagcaagggcgatattctccagagagttagggagatacgctaccaaggtgggaaccgtacaaatactggattagccctgagatacctgagcgatcatagctttctagtgtcacagggcgatagagaacaggctccaaacctggtgtatatggtcaccggcaatcccgcctctgatgagatcaaacgcctacctggcgatatacaggtggtgcccatcggagtgggtcccaatgctaacgtgcaggaactggagcgcatcggctggcctaacgcacctatcttaattcaggatttcgagacactgccaagagaagcccccgatctagtcctccagcgctgttgcagcggcgaggggctccagatcccaacactgagcccagctccagattgtagccaaccattggacgtgatactccttttagatggttctagttcctttcctgcttcttattttgatgagatgaagtctttcgctaaagcatttattagcaaagctaacattggtccacgcctgacccaggtctccgtgctgcagtatggatctatcaccactatagacgtgccctggaacgtggtgcctgagaaggcacatctgctatccctggtggatgttatgcagagagaaggcggccctagccaaatcggagacgctcttggattcgcagtgcgatacctgacatctgaaatgcacggcgcccgtcctggagccagcaaagccgtggtgattctggtgaccgacgtgtctgtggacagcgtcgacgccgccgccgatgccgccagatccaatagagtgaccgtgttccccattgggattggggaccgctacgatgcagcccaactgcgcatactggctggacctgctggcgatagtaatgttgtcaagctgcagaggatcgaagatctgccaacaatggtgacactaggcaactccttcctccataagctctgcagtgggtttgttcggatttgtatggacgaggacggcaatgagaagcgcccgggcgatgtgtggactctaccagaccaatgccacactgtgacatgccagccagacggccaaacactgctgaaaagccacagagttaattgcgataggggccttcggcccagttgtcccaacagccaatctccagtgaaagtagaagagacttgcggatgtagatggacctgtccttgcgtctgcactggctcaagtacacggcacattgtgactttcgatggccagaacttcaagctgacagggtcctgtagttatgttctattccagaacaaggaacaggacctcgaagtgatcttgcacaacggagcttgctctccaggtgcacggcaaggctgtatgaagtcaatagaggtcaagcattccgccctatcagtcgagctgcatagtgacatggaggtaactgtgaatggccgcctagtgagcgttccctatgtgggagggaacatggaggtcaacgtgtacggagccatcatgcacgaggttagattcaatcatctgggccatatatttaccttcacacctcagaataacgaattccagctacagctgtccccaaaaaccttcgcctccaagacttacggtctgtgtgggatatgtgatgagaacggagcaaatgactttatgttaagggatggtaccgtcaccaccgactggaaaactctggttcaggagtggactgtgcagagacctggccaaacttgtcagcctattttggaggaacagtgcttagtgcctgattcctcccactgtcaggtgctcctgctgccgctgttcgccgaatgccacaaggtactggctcccgcaaccttttacgcaatttgtcagcaggacagctgtcaccaggagcaggtgtgcgaggttattgcctcttatgcacatctgtgtcgtactaacggcgtttgcgttgactggcgaacccctgacttctgcgctatgtcctgtcccccttcattggtctataaccattgtgaacacggctgtcctagacattgtgatggaaacgtatcttcttgtggagaccacccttcagagggctgtttttgcccaccagacaaggtgatgctcgaaggcagttgcgttcccgaagaggcctgtacccaatgtatcggggaagatggggttcagcaccagtttctcgaggcctgggtgcccgaccatcaaccctgtcaaatttgtacctgcctaagcggaaggaaggtgaactgcactacacagccatgccctaccgcaaaggccccaacctgtggtttgtgtgaggtggccagactgcggcagaacgctgaccaatgctgtcctgagtatgaatgcgtctgcgaccccgtgagctgcgacctgcctcccgtcccacattgcgaacgtggcctacaacccaccctcactaatccaggcgaatgtagacctaacttcacctgcgcttgtaggaaagaagagtgcaagcgcgtgagccccccctcttgccctccacacaggctaccaacattgcgcaaaacacaatgctgtgacgagtatgagtgcgcttgcaactgcgtgaacagtacagtgagctgcccactgggctatctcgccagcactgctactaatgattgcgggtgtacaaccacaacttgcttaccagacaaggtttgtgtacatcggagcaccatatatcctgtaggccagttttgggaagagggctgcgatgtgtgcacctgtacagacatggaggacgctgtgatgggcctgcgcgtggcacagtgtagccagaagccttgcgaagatagctgccggagtggctttacctatgtgctgcatgaaggggagtgctgcgggaggtgtctgccaagcgcttgcgaggtggttaccggctccccaaggggcgacagccagagcagttggaaatctgtggggtctcagtgggcatcacccgagaacccatgtttaataaatgagtgcgtgagagtgaaggaagaagttttcatccagcagcgcaacgtgagttgccctcagctagaggtgccagtctgtccctccggcttccagctgtcttgtaagacttcagcctgctgtccttcttgtcggtgcgagcgaatggaggcatgtatgctaaacgggaccgttatcgggccagggaaaacagttatgattgacgtgtgtaccacctgcagatgcatggttcaggtgggcgtgatcagcggattcaaattagaatgtagaaagactacctgcaatccatgccctttggggtacaaggaggaaaacaacacaggcgaatgttgcggcaggtgcctgcctaccgcctgcactattcaacttcggggcggccagatcatgactttaaagagagacgaaactcttcaggatggctgcgacacccatttttgcaaagttaatgagcgcggcgagtacttttgggagaagagggtgacaggctgtcccccattcgatgagcacaaatgcctggccgaaggcggtaagatcatgaagatacccggcacctgctgtgatacctgtgaggagcctgaatgtaatgatattacagccagactgcagtacgtgaaggtcggctcttgtaaatcagaagtggaggttgacatccactactgtcaggggaagtgcgcatccaaggcaatgtattctatagatatcaacgatgttcaggaccagtgctcctgctgtagccccacccggactgagccaatgcaggtggcattacactgtacaaatggctcagtcgtgtaccacgaagtcctgaatgccatggagtgcaaatgttcccctcgtaaatgctctaag

SEQ ID NO: 21384 - DNA, 8439 bp, synthetic construct
  misc_feature 1..8439: note = source = /note="Description of Artificial Sequence: Synthetic coding sequence"
  source 1..8439: mol_type = other DNA
atgatcccagctaggtttgccggagtcctcctcgccctcgcactgatactccccgggacactctgcgctgaagggacacggggacggtcatctactgcaaggtgctctctgtttggaagtgatttcgtcaatacattcgatggatccatgtactccttcgcagggtactgttcatatctgctcgccggaggatgtcagaaacggtccttctcaattataggagattttcaaaatggaaaacgggtgtctctatccgtgtatctgggagagttctttgatattcacttgtttgtcaacgggactgtgacacagggagatcagagagtcagtatgccctatgcctcaaaagggctctacttggaaacagaagctggatactacaaactttcaggggaggcctacgggtttgtcgctcgcatcgatgggagtggaaactttcaggtgcttctctcagatcgatatttcaataaaacatgtggactttgtgggaactttaacatctttgccgaagacgatttcatgacacaggaaggaacattaacatcggatccttatgatttcgctaactcctgggctttatcctcaggggaacagtggtgtgaacgagccagtcccccctcttcctcttgcaacatttctagtggggagatgcagaaaggactgtgggaacagtgtcagcttctgaaatccactagtgtcttcgccagatgtcatccactggtcgatcctgagcccttcgtggctctctgtgagaaaacactctgcgaatgtgctgggggactagaatgtgcctgtcccgcattactagaatatgccagaacatgtgcccaggaaggaatggttctatatgggtggactgatcatagtgcgtgtagtcctgtctgtccagctgggatggaatacaggcagtgtgtgagtccctgtgctagaacatgtcagtccttgcatattaacgagatgtgccaggagcgctgtgtggatggatgctcctgtcccgaagggcagctactcgatgaagggctttgtgtggagtccacagagtgtccttgtgttcattcagggaaacggtatccccctggaacttctcttagtcgcgactgcaatacatgtatctgtagaaactctcagtggatatgtagtaatgaagaatgccccggggaatgtctcgtcacagggcagtcacattttaagtcctttgataacaggtattttacattctccggaatctgtcagtatttactcgccagggattgccaagaccattcttttagtatcgtaatagaaactgtgcagtgcgccgatgacagagatgccgtttgcactagatccgtgactgtgcggttacccgggctccacaattcactcgtcaaattaaagcatggggccggagttgctatggatgggcaggatgtgcagttacccttactgaaaggggatcttaggattcagcatactgtaacagcctccgtgcggctttcctatggggaagacttacagatggattgggatggacgagggcggctgctggtgaaattaagtcccgtttatgcagggaaaacatgtggactgtgtgggaattacaatgggaatcagggggacgactttcttacaccctccgggctggcggaacctcgagtggaagattttggaaacgcctggaaactgcatggggattgtcaggatcttcagaaacagcacagtgacccttgcgcactcaacccccggatgacgcgattcagtgaagaagcatgcgccgtcctcactagtcctacattcgaggcatgtcatcgggccgtgagtcctctcccatatcttagaaactgcagatatgatgtgtgtagttgttctgatggacgggaatgcctgtgtggggcactcgcctcttatgcagctgcatgcgctggacggggagtgcgggtcgcctggagagagcctgggaggtgtgaattaaattgccctaagggacaggtctatctccagtgcgggacaccatgtaaccttacatgtaggtctctgtcatatcccgatgaagagtgtaacgaagcttgcctggaagggtgtttttgtccccccgggctctatatggatgaacgaggagattgtgtccctaaggcccagtgtccatgttattatgatggggaaatattccagcctgaagatatattctctgatcatcacacaatgtgttactgtgaagatgggtttatgcactgcacaatgtcgggggttccaggaagtcttctgcccgatgcggtgctatcatcacctctgtcacaccggtcgaaaaggtccctgagttgccgacccccaatggtgaagttggtgtgtccagcagataacttacgcgctgaagggcttgaatgtacgaaaacatgtcagaactatgatctggaatgtatgtcaatggggtgcgtatcagggtgcctttgccccccaggaatggtgagacacgaaaataggtgtgtagctctggaaagatgcccctgctttcaccaggggaaagaatatgctccaggggaaacagtgaaaatcggatgcaatacttgtgtttgccaggatcggaagtggaattgcacagatcacgtgtgtgatgcaacatgtagtactatcggaatggctcattatctcacatttgacggattaaaatatctgttcccaggggaatgtcagtatgttctggttcaggattactgcggatctaaccctgggacatttcgcatcctcgtggggaacaaagggtgctctcacccttcagtgaaatgtaaaaaacgcgtaacaatcttagttgaaggaggagaaatagaactcttcgatggagaggtgaatgtcaaaagacccatgaaagacgaaacacacttcgaggtggtcgaatccggaaggtatataatccttctcctcggaaaagctttgtctgtcgtctgggataggcacctgtctatctcagtcgtcctcaagcagacttaccaggaaaaagtctgtggactatgtggaaattttgatggaatccagaacaatgatctcacttcttcaaacttgcaggtcgaagaagaccccgtggatttcggaaattcatggaaggtctcttcacagtgtgctgatacaagaaaagtccccttagactcttccccagccacatgccacaacaacattatgaaacagacaatggtggattcgagttgtcgcatcctcacttccgatgtattccaggattgcaacaaactcgttgatccagagccatatcttgacgtgtgtatatatgatacatgttcatgtgagtctattggagattgcgcatgcttctgtgatacaatcgccgcctacgcccatgtttgcgcacagcacgggaaagttgttacatggcggactgctactctgtgtccacagtcttgtgaagaacggaacttgagagaaaatggatatgaatgtgaatggcggtataattcctgcgccccggcatgtcaggtgacttgtcagcaccccgagcccctggcatgtcccgtgcagtgcgtcgaggggtgccatgcacattgccctccgggaaaaatcctcgatgagcttctgcagacatgcgtagatcccgaagattgtcctgtttgtgaggttgcaggacggagatttgcaagtgggaaaaaggtgacactgaacccatccgatcccgaacattgccagatctgtcactgtgatgtggttaatcttacttgtgaagcatgccaggaacccggaggattagtggtccccccaactgacgcacctgtatccccaactactctatatgtggaagatatatcagaacctcctctgcatgatttttattgctctcggctattagacttagtgttccttttagacgggtcctcaaggttgtcagaagcagaattcgaagtattaaaagcctttgtggttgacatgatggaacgacttcgcatcagtcagaaatgggtgcgggtagctgtggtcgagtatcacgatggatctcacgcttatatcgggcttaaggaccggaaacgcccatccgaactcaggagaatcgcttctcaggtgaaatacgcaggatcccaggtcgcctccactagtgaagtgctcaaatatacactatttcagattttttctaaaatagatcggcctgaagcttcacgcattacactgctcctaatggcttctcaggaaccacagcggatgagtaggaattttgttcgctatgtgcagggactgaaaaaaaaaaaagtgattgtgattccagtggggatcgggcctcatgctaatcttaaacagatacgacttatcgaaaaacaggcaccagaaaacaaagcatttgtgctgtcttctgtagatgagctggaacagcagagggatgaaatagtttcctatctttgtgatctagcccccgaggccccccctccaacgcttcctcccgatatggcacaagtgacagtcggaccggggctactgggagttagtacacttggacctaaaagaaactctatggttctcgacgttgctttcgtgctcgaagggtcagataaaattggggaagctgatttcaacaggtcaaaagaatttatggaagaagtaatccagcggatggatgtagggcaggattccatccacgtgactgttctgcagtactcctatatggtgactgtcgaataccccttttctgaagctcagtcaaaaggggatattttacagagggtacgggaaataaggtaccaaggggggaaccgcactaatacagggcttgctctccggtatctctctgatcactctttcctcgtgtcacagggggatagagaacaggctcccaatcttgtctacatggtcacaggaaatccagcaagtgatgagataaagaggctacccggggatatccaggtggtgcctataggggttgggcccaatgcaaacgtacaggaactggagaggatcggatggcccaacgctcccatactcatccaggattttgaaacactcccacgtgaggcccctgatctggtgctgcagcggtgctgctctggagagggacttcagatcccaacactttctcctgcccccgattgctcacagcccctcgacgtcatactccttctcgatgggtcttcatcatttcctgcctcgtattttgacgagatgaaatctttcgctaaggctttcatatccaaagccaacataggacccaggctcactcaggtcagtgtactgcagtatggaagtattactacaattgatgtcccatggaacgtggtccctgaaaaagcgcatctgctctcattagttgatgttatgcagagagaaggaggaccctcccagataggagacgccttgggattcgccgtaagatacctgacatctgaaatgcatggagccaggccaggagcttctaaagctgtggtgatcctggtaactgatgtgtctgtagattcggtcgatgctgcagctgatgccgcccggtctaacagagtgactgtctttcccatagggatcggggatcggtatgacgccgcccagcttcggattcttgccgggccagcaggagattctaacgtggtaaaactacagcggatcgaagatctgcctacaatggtgacgctcggaaattccttcttacacaaactgtgctcgggattcgtgagaatttgtatggatgaagatgggaatgaaaaacggcccggagatgtgtggacactccctgaccagtgtcatacagttacatgtcagcccgatgggcagacactcttaaaatcccaccgggttaactgtgatcgcggactgaggcctagttgtccaaattcccagagtccagtcaaagtggaagaaacatgtggatgcaggtggacttgtccctgcgtatgtacagggtcttcaactagacatatcgtgacatttgatgggcagaatttcaaactaactgggtcttgttcatacgtactctttcagaacaaagagcaggatctcgaagtaattctccataacggagcgtgctcccctggagcccgacaggggtgtatgaaaagtatcgaggtgaagcattcggccctctctgtggagcttcattctgatatggaggtgacagtgaacggacggcttgtgtccgttccgtatgtggggggaaatatggaagtcaatgtctatggagcaattatgcacgaggtgcgtttcaaccacctcggacacattttcacttttactcctcagaacaatgaatttcagctccagctctctcccaaaactttcgcctctaaaacatatggactttgcgggatatgtgacgaaaatggggccaacgattttatgttacgcgatgggactgtcactactgactggaaaactctcgtacaggagtggacagtccagcggccagggcagacttgtcagcctatcctggaagagcagtgtctcgttcctgattcttctcactgtcaggtgttattgctccctctgtttgcagaatgtcataaagtcctagccccagctacattctatgcaatctgccagcaggattcatgccatcaggaacaggtgtgtgaagtcattgcaagttacgcacacctttgtcgcactaacggggtatgtgtcgattggcggactccagacttttgtgcgatgtcctgtccgccctccttggtctataaccattgcgaacacgggtgccctcgacattgtgacgggaacgtgagtagttgtggggatcatccctcagaagggtgcttctgtccccccgataaagtaatgctcgaagggagttgcgtccccgaagaagcctgcacacagtgcatcggagaggatggagtgcagcaccagtttcttgaagcttgggtccctgatcaccagccctgtcaaatctgtacttgcttgtctggacgtaaagtgaattgcacaacacagccctgtcctactgctaaagctcccacttgcggactatgtgaggtcgctagactaaggcagaatgccgatcagtgctgtcccgaatacgaatgcgtttgcgaccctgtcagttgtgacctccccccagtaccacactgcgagcgcgggttgcagcccacactaacaaacccaggagagtgtcggcctaacttcacatgtgcttgtcggaaagaagaatgtaaaagggtttcaccccctagttgtcccccccacaggcttcctacacttaggaaaacgcagtgttgtgatgaatacgagtgcgcatgcaactgcgtgaactctactgtctcctgtcctcttgggtacttggcttccacagcaactaatgattgtggatgtactacaactacatgtctgcctgataaagtttgtgtgcacaggtctacaatctatccagtgggacagttttgggaagaagggtgtgacgtttgcacatgtactgatatggaagatgcagttatggggctcagagtggcacaatgttcacagaaaccatgcgaagattcctgtaggtctggattcacttatgtcctacatgaaggagagtgctgtgggagatgtctcccttcagcttgcgaagtcgtaactggaagtccaagaggagattcccagtcttcctggaaaagtgtcgggtctcagtgggcttcacctgagaacccctgcttgataaacgaatgtgtgagggtgaaagaggaagtattcatacagcagagaaatgtgtcatgtcctcagttagaggtgcctgtatgcccctctgggtttcagttatcttgtaaaacatcggcctgttgtccttcatgtagatgtgaacgtatggaagcttgcatgctgaacgggacagtgatagggccagggaaaactgtgatgatcgacgtttgcacaacttgtcgatgcatggtgcaggttggggtcatctcgggattcaaactggaatgtagaaagacaacatgtaacccctgccccttaggatataaagaagaaaacaatactggggaatgctgtggaaggtgtcttcctacagcctgtacaattcagctgaggggaggacaaataatgacactcaaacgcgatgaaacactacaggatgggtgcgatacacacttctgtaaagtaaatgaaaggggggaatatttttgggaaaaaagagtgactggatgtcctcctttcgacgaacacaagtgtctggcagaggggggaaaaattatgaaaatccctggaacttgttgcgacacttgcgaagaacccgagtgtaacgatatcactgcacggcttcagtatgttaaagtagggtcttgtaaatccgaagtggaagtggatatccattattgtcaggggaaatgtgcaagtaaagcaatgtattcaatcgacatcaatgatgtgcaggaccagtgttcctgttgctccccaacaaggacggaacccatgcaggtggctctgcattgcactaacggatccgtggtgtaccacgaagttctgaacgccatggagtgcaaatgtagtccccggaaatgttctaaa

SEQ ID NO: 21385 - DNA, 8439 bp, synthetic construct
  misc_feature 1..8439: note = source = /note="Description of Artificial Sequence: Synthetic coding sequence"
  source 1..8439: mol_type = other DNA
atgattccagctagatttgcaggtgttttattagctttagctcttattttaccaggaacattatgtgctgaaggaactagaggaagatcaagtacagctagatgttccttattcggttcagactttgtaaatacttttgatggatctatgtattctttcgcagggtattgtagttatttattagcaggtggatgtcaaaaaagaagtttttctataattggggattttcaaaatggtaaaagagtaagtttatcagtatatcttggtgaattctttgacattcatttatttgttaatggaacagtaactcaaggtgatcagcgtgtttcaatgccatatgcatcaaaaggattgtatttagaaactgaagcaggatattataaacttagtggagaagcatatggatttgtagctagaattgatggaagtggaaacttccaagttttactttcagatagatattttaataaaacttgtggactttgtggaaattttaatatttttgctgaggatgatttcatgactcaagaaggaacacttacatctgatccatatgattttgctaatagttgggcattgtcaagtggtgaacaatggtgtgaaagagcatcaccaccatcatcatcatgtaatatttcatctggagaaatgcaaaaaggattatgggaacaatgtcaattacttaaaagtacatcagtttttgcaagatgtcatccacttgttgatccagagccatttgttgctctctgtgaaaaaactttgtgtgaatgtgctggaggacttgaatgtgcatgtccagctcttttagaatatgctagaacatgtgctcaagaaggaatggttttatatggatggactgatcattcagcatgtagtcctgtatgtccagcaggaatggaatatcgacaatgtgtatctccttgtgcaagaacttgtcaatctcttcatattaatgaaatgtgtcaagaaagatgtgttgatggatgttcatgtccagaaggacaacttttagatgaaggattatgtgttgaatcaacagaatgtccatgtgttcatagcggaaaaagatatccaccaggaactagtttaagtcgtgattgtaatacatgtatatgcagaaattcacaatggatttgtagtaatgaagaatgtccaggtgaatgtttggttaccggacaatctcatttcaaatcatttgataatcgttactttactttttcaggaatttgtcaatatcttttagcaagagattgtcaagaccattcattttcaattgttatagaaactgttcaatgtgcagatgatagagatgctgtttgtactaggtcagttacagttagattaccaggacttcataatagccttgttaaacttaaacatggtgcaggtgtggcaatggatggacaagatgttcaacttcctttgcttaagggagatttaagaattcagcatactgtaacagcttcagttagacttagttatggtgaagatttacaaatggattgggatggaagaggaagactacttgttaaattaagtccagtatatgctggaaagacttgtggattatgtggtaattataatggtaatcaaggggacgatttcttaacaccatcaggtttagcagaaccacgagtagaagattttggtaatgcctggaaacttcatggagattgtcaagatttacaaaaacaacactcagacccatgtgctcttaaccctagaatgactcgtttctcagaagaagcttgtgctgtattaactagtccaacttttgaagcttgtcacagagctgtctcaccattaccatatctaagaaattgtagatatgatgtctgtagttgttccgacgggagagagtgtctttgtggagcattagcatcatatgcagctgcttgtgctggaagaggagtccgagtggcctggagagaaccaggaagatgtgaattaaattgccctaaaggacaagtttatcttcagtgtggaactccatgtaatcttacttgtagatctttatcatatccagatgaagaatgtaatgaagcttgtttagaaggttgtttttgtccaccaggattatatatggatgaaagaggagattgtgttccaaaagcacaatgtccatgctattatgatggagaaatttttcaaccagaagatatttttagtgatcatcatactatgtgttattgtgaggatggatttatgcattgtactatgagcggtgttccaggttctcttttaccagatgcagttctttcatctccattatcacatagatctaagcgttctttgagttgtcgtccaccaatggttaaacttgtatgtccagcagataatttaagagcagaaggacttgaatgtactaaaacatgtcaaaactatgatcttgaatgtatgtcaatgggatgtgttagtggatgtttatgtcctccaggaatggttagacatgaaaatagatgtgtagcattagaaagatgtccatgttttcatcaaggaaaggagtatgccccaggagaaacagttaaaattggttgtaatacatgtgtgtgtcaagacagaaaatggaattgtactgatcatgtctgtgatgctacttgttctacaattggaatggctcattatttaacatttgatggactcaaatatttatttccaggtgaatgccaatatgtcttagtacaagactattgtggttcaaatcctggtacattcagaatattagttggtaataaagggtgctctcatcctagtgttaaatgtaaaaaaagagttacaattttagtagagggaggagaaattgaattatttgatggagaggtcaatgttaaacgaccaatgaaagatgaaactcattttgaagtagttgaaagtggacgatatattatattattattgggaaaagctttaagtgttgtatgggatagacatttatcaatttcagttgttctaaaacagacatatcaagaaaaagtatgtggactttgtggaaattttgatggaatccaaaataatgatcttacaagttcaaatttacaagttgaagaagatcctgttgattttggaaatagttggaaagttagtagtcaatgtgctgatacaagaaaagttccacttgattcatcaccagctacatgtcataataatattatgaaacaaacaatggtagattcttcttgtagaattttaacttcagatgtatttcaagattgtaacaaattggtagatccagaaccttatttggatgtatgtatttatgatacatgttcatgtgaaagtattggtgattgtgcatgtttttgtgatacaattgcagcttatgctcatgtttgtgctcaacatggaaaggtagttacatggagaacagcaaccttatgtcctcaaagttgtgaagaaagaaatttaagagaaaatggatatgaatgtgaatggagatataatagttgtgcaccagcatgtcaagtaacttgtcaacatcctgaaccacttgcatgtccagtacaatgtgtggaaggatgtcatgctcattgcccaccaggaaagattttagatgaattgcttcaaacatgtgttgatccagaagattgtcctgtttgtgaggtagctggaagaaggtttgcatctggaaagaaagttactcttaatccttctgatccagaacattgtcaaatttgtcattgtgatgttgttaatttaacatgtgaagcttgtcaagaaccaggaggtttggtagttccaccaactgatgctcctgtatcaccaacaacattatatgtagaagatatttctgaacctccacttcacgacttttattgctcaagattattggatttagtattcttattggatggatcatcaagattaagtgaagctgaatttgaagtactaaaagctttcgtagttgatatgatggaaagacttagaattagtcaaaaatgggtaagagtggctgttgttgaatatcatgatggttctcatgcttatattggattaaaagatagaaaaagaccatcagaacttaggagaattgctagtcaagttaagtatgcaggttcacaagttgcaagcacttcagaagtactcaaatatacactttttcaaattttctctaagattgatagaccagaagcttcaagaattacattacttttaatggcttctcaagaaccacaaagaatgagtagaaattttgttagatacgtgcaaggattaaaaaaaaaaaaagttattgttattccagttggtattggaccacatgctaatttaaaacaaattagacttattgaaaaacaagcaccagaaaataaggcatttgttttaagttctgttgatgaacttgaacaacagcgtgacgaaattgttagttatttgtgtgatttagcaccagaagcaccaccacctacacttccaccagatatggctcaagttacagttggtccaggtttattaggagtttcaactcttggaccaaaaagaaattcaatggtattggacgttgcatttgttcttgaaggttcagataaaattggagaagcagatttcaatcgttcaaaagaatttatggaagaagttattcaaagaatggatgtaggtcaagatagtattcatgttactgttcttcaatactcttacatggttacagttgaatatccattttctgaagctcaatcgaaaggagacatcttacaaagagttagagagataagatatcaagggggaaatagaacaaatactggacttgcacttcgatatctttcagatcattcttttcttgttagtcaaggggatagagaacaagcaccaaatcttgtctatatggttacaggaaatccagcatcagacgaaattaagagattacctggagatattcaagttgtaccaattggagtaggtccaaatgctaatgtacaagagttagagagaattggatggccaaacgctccaattttaattcaagattttgaaactttaccaagagaagctcctgatttagttttacaaagatgttgttctggagaaggattacaaattcctacgttaagtcctgcaccagattgttcacaaccattagatgttattttattgcttgatggatcatcttcttttccagcttcatattttgatgaaatgaaatcttttgctaaagcatttatttctaaagctaacataggaccaagattaactcaagttagtgtacttcaatatggaagtattacaaccatagatgtaccttggaacgtggttcctgaaaaagctcatttgttatctcttgttgatgtaatgcaacgagaaggaggaccatcacaaattggagatgctttgggattcgctgttagatacttaactagtgaaatgcatggtgctcgtccaggagcatcaaaggctgttgtgattttagttaccgatgtttcagttgattcagttgacgcagcagctgatgctgcaagatcaaatagagtaacagtttttccaattggaataggagatcgttatgatgctgcacaattaagaatattagcaggaccagcaggagatagcaatgtagtaaagcttcaaagaattgaagatcttccaactatggtaacattaggaaacagttttttacataaattatgttctggatttgttcgaatttgtatggatgaagatggaaatgaaaaaagaccaggagacgtttggactttaccagatcaatgtcatactgttacttgccaaccagatgggcaaactttacttaagtcacatagagtaaattgcgatagaggattaagacctagttgtccaaattcacaaagtccagttaaagttgaagaaacatgtggatgtagatggacatgcccatgtgtttgtactggttcttcaactcgacatattgttacttttgatggacaaaattttaaattaactggaagttgtagttatgtacttttccaaaataaagaacaagatttagaagttatattacataatggagcttgttcaccaggagcacgtcaaggatgtatgaaatctatagaggttaaacattctgcattatctgttgagttacatagtgacatggaagtaactgttaatggaagattagtttcagtaccatatgttggaggaaatatggaagtaaatgtttatggtgctattatgcatgaagttcgatttaatcatttaggacacatttttacattcacacctcagaacaatgaatttcaattacaactttcaccaaaaacattcgcttctaagacttatggattatgtggtatatgtgatgagaatggtgctaacgattttatgcttagagatggtaccgttactactgattggaaaacacttgttcaagaatggacagttcaaagaccaggtcaaacatgtcaacctattttggaagaacaatgtttagtaccagatagttctcattgtcaagttttgttattaccactttttgcagaatgccataaagttttagcaccagcaactttttacgctatttgtcaacaagattcctgtcatcaagaacaagtatgtgaagtaatcgcatcatatgcacatctttgtagaacaaatggtgtatgtgttgattggagaacaccagatttttgtgctatgtcatgtccaccatcattagtttataatcactgtgaacatggttgcccacgacattgtgatggaaatgtatcaagttgtggagatcatccaagtgaaggatgcttttgtccacctgataaagttatgttagaaggatcgtgcgttccagaggaagcttgtacacaatgtattggagaagatggagttcaacatcaatttttagaagcatgggttccagaccatcaaccatgtcaaatatgtacctgtctttcaggtagaaaggtgaattgtacaactcaaccatgtccaactgctaaggcaccaacttgtggattatgtgaagtagctagattaagacaaaacgctgaccaatgttgtcctgaatatgaatgtgtttgtgatccagtgagttgtgacttaccaccagtacctcattgtgaaagaggattacaaccaacattaacaaatcctggagaatgccgtccaaattttacatgtgcttgtagaaaagaagaatgtaaaagagtgtctccaccatcttgtccacctcatagattaccaactttaagaaaaacacaatgttgtgacgaatatgaatgtgcatgtaattgtgttaacagtacagttagttgcccattaggatatttagcatctacagctactaatgattgtggttgcacaacaactacatgtttaccagataaggtttgtgttcatcgttcaacaatttatccagtaggtcaattttgggaagaaggatgtgacgtatgcacttgtacagatatggaagatgcagttatgggattaagagttgctcaatgttctcaaaaaccttgtgaagattcatgtagaagtggattcacttatgttttgcatgaaggtgaatgttgtggaagatgtttaccatctgcatgtgaagttgttactgggtctccacgaggagattctcaaagttcttggaaatctgttggtagtcaatgggcttcaccagaaaatccatgtcttattaatgaatgtgttagagttaaagaagaagtatttattcaacaaagaaacgtttcatgtccacaattggaagtaccagtttgtccatcaggatttcaattgagctgtaaaaccagtgcttgttgtccatcatgtcgttgtgagagaatggaagcatgtatgttaaatggaactgtgattggtccaggaaagactgtaatgattgatgtgtgtactacatgtagatgtatggttcaagttggagttattagtggatttaaacttgaatgtcgtaaaactacttgtaatccatgtccattaggatataaggaagaaaataatacaggagagtgttgtggaagatgtcttccaacagcatgtacaattcaattaagaggaggacaaattatgacattaaagagagatgaaacattacaagatggttgtgatacacatttctgcaaagtaaatgaaagaggagaatatttttgggaaaagagagtcacaggatgtcctccatttgatgaacataagtgtttagcagaaggaggaaagattatgaaaatcccaggaacttgctgtgatacttgtgaagagccagaatgtaatgatataactgctagattacaatatgttaaggttgggtcatgtaaatcagaagttgaagttgatattcattattgtcaaggtaaatgcgcttcaaaagcaatgtatagtattgacattaatgacgttcaagatcaatgtagttgttgctctccaactagaacagaacctatgcaggtagcattacattgtactaatggttcagttgtatatcatgaagttcttaatgctatggaatgtaagtgttcaccaagaaaatgtagtaaa

SEQ ID NO: 21386 - DNA, 8439 bp, synthetic construct
  misc_feature 1..8439: note = source = /note="Description of Artificial Sequence: Synthetic coding sequence"
  source 1..8439: mol_type = other DNA
atgattcccgccagattcgccggcgtcttgctggctctggccctgattctgccgggaactctgtgtgctgaaggaaccaggggaaggagctccaccgcccggtgcagtctgttcggaagtgatttcgtgaacacatttgatggctcaatgtatagcttcgcaggatattgctcctatctgctcgccggtgggtgtcagaagcgatccttctcgatcattggcgatttccagaatggcaagcgcgtatccctgagtgtgtatctgggggagttttttgatatacatctcttcgtgaacggaacagtcacccaaggtgaccagagggtgagtatgccatacgctagcaaaggactctatttagagaccgaggccgggtattacaagctgtccggcgaggcttacggtttcgtggccaggatcgatggatctggcaatttccaggtgctccttagtgataggtattttaacaaaacctgcgggctgtgtggaaatttcaatattttcgccgaggatgattttatgacacaggaaggaacactaacgtctgacccttatgacttcgccaatagctgggcattgtcttccggtgagcaatggtgtgagagagcgtctcccccttcatcctcttgcaacatttcatcaggggagatgcagaagggcttatgggagcaatgccagctattgaagagcacttcagtgtttgcccgctgccacccccttgtggacccagaacccttcgtcgccttatgcgaaaaaacactttgtgaatgcgcgggaggactggaatgcgcatgccccgcgttgctcgaatatgccagaacatgcgctcaagagggaatggtgctgtacgggtggaccgatcactccgcctgtagccccgtttgtccagcaggtatggaatacaggcagtgcgtgtcgccctgtgcccgtacctgccaatcactccatatcaacgaaatgtgtcaggaaaggtgtgtagatggatgttcctgtcccgaagggcaactgctggatgagggactttgtgtggaatccacggaatgcccctgcgtacattctggaaagagatacccaccgggaacaagtttatctcgggactgtaatacctgcatctgccgtaactcacaatggatctgctctaatgaagagtgcccaggcgagtgcctagtaactggtcagtctcactttaagagctttgacaatcggtacttcaccttcagcgggatctgccaatatctgctggcgcgagactgccaggatcattcgttcagtatagtgatagaaaccgttcaatgtgcagatgacagagacgctgtgtgtacccgttccgtgaccgttcgcctgcccggccttcataattctctagtgaagttaaagcatggggcaggcgtagccatggacggacaggatgtgcagctcccactcctcaagggcgacctgagaatccagcataccgtgaccgcgagcgtccgtctcagctacggggaggatctgcagatggattgggatggccggggccggttattggtgaaattgagtcccgtatatgcgggcaagacctgcgggctgtgcggtaactacaatggaaatcaaggcgacgatttcctgactccgagtgggctggctgagcccagggtggaggactttggtaatgcctggaaattgcacggagactgccaagaccttcagaagcagcacagtgacccatgcgcactcaacccgaggatgacacgctttagcgaagaagcgtgtgccgtccttaccagtcccacgttcgaggcctgtcacagggccgtatctcctctgccttaccttagaaactgtcggtacgatgtgtgtagctgttctgatggtcgcgagtgcctgtgtggagccttagcctcatacgcggcggcatgtgctggccggggcgtccgcgtagcttggcgagaaccagggcggtgcgagctgaattgccctaagggacaggtgtacctccagtgcggcaccccctgcaacttgacttgcaggagcctgagctatcccgacgaggagtgtaacgaagcgtgtctggagggttgcttctgtcctccgggcctgtatatggacgaacggggcgattgcgtgccaaaggcccagtgtccgtgttattacgatggagaaatctttcaaccggaggatattttttcagaccaccacacaatgtgctactgcgaggatggtttcatgcattgtacaatgagtggagtacccggctctctgctgcccgacgcagtattgtcctcgcctctcagtcacagatctaagaggagcctgagctgtcgaccgcctatggtaaaactggtgtgtcctgctgacaatttgagggccgaaggccttgaatgtaccaagacgtgccagaactatgaccttgaatgcatgtccatgggctgtgtgagtggatgtctctgcccaccaggaatggtgcgccatgagaatcgatgcgtcgcgctggagagatgcccctgctttcaccaggggaaggagtacgcgccaggagaaacagtgaaaatcggctgcaatacatgtgtttgtcaagataggaaatggaattgtaccgatcacgtgtgcgacgcaacttgtagtaccattggaatggcccattatctgacctttgatggcctgaaatacctgttccctggcgagtgtcagtacgtcctcgtgcaggactattgcgggagcaaccctgggaccttccgcatactagtgggtaacaagggatgctcacatccttctgtcaaatgcaagaagagagtaacgatcttggtggaaggcggtgagatcgaactgtttgacggagaagtcaatgtgaagaggcctatgaaggacgagacccactttgaagtcgtcgagtcaggccggtacatcatcttattgctgggcaaggctctgagcgtcgtgtgggaccggcatctgagcatttctgtggtgctcaaacagacataccaggagaaggtatgcggcctgtgcgggaactttgacggtattcagaataatgaccttactagtagcaatctccaggttgaggaagaccccgttgactttgggaactcttggaaagtctcgagccagtgcgccgataccaggaaggttcctctcgacagcagcccagccacttgtcacaataacattatgaaacagacaatggtggattcttcatgcagaatcttaaccagcgatgtgttccaagactgcaataagctagtcgatccagaaccttatttggatgtatgcatctacgacacttgtagctgcgaaagtataggcgattgtgcctgcttctgtgatacaattgctgcgtatgcacatgtgtgcgctcagcatggcaaagtggtcacctggagaactgctaccttatgcccccagtcttgtgaagagaggaaccttcgagaaaatggctatgagtgcgaatggagatataattcttgcgcgccagcttgtcaggtgacgtgccaacaccctgaaccgctggcttgccctgtccaatgcgttgaggggtgccacgctcactgccccccaggcaagattctcgacgagctgttgcagacatgcgtagaccccgaggactgcccagtatgtgaagttgcgggtcgaaggttcgctagcggaaaaaaggtgactctgaacccttcggaccccgagcactgccaaatctgccattgcgatgtagtcaatctaacctgcgaggcctgccaagagcccggaggtttagtagtgccccccaccgatgccccagtttcacccactaccctgtacgtggaggacatttccgagcccccgctgcatgatttttactgttctcggttgcttgatctggtcttcctgctggatggcagttcgaggttgagcgaggccgagttcgaggtgcttaaagcttttgtggttgatatgatggagagactgaggatttctcagaaatgggtgcgggtcgcggtcgtcgaatatcacgatggaagtcacgcctacattggcctcaaggaccggaagaggccttctgagttaagacgaatagctagccaagtgaagtatgcagggtcccaagtggccagtacaagtgaggtgttgaagtatacgctcttccagatctttagcaagatcgatagacctgaggcctcacgtatcacactccttcttatggccagtcaggagccgcaaagaatgtcccgtaattttgtgcggtatgtgcaggggcttaagaaaaagaaagtcatcgtaatacccgtggggattggaccgcacgcgaaccttaagcaaatccgcctcatcgagaagcaggcaccggagaacaaagctttcgtgctcagcagtgtggacgaacttgagcagcagagggacgagatcgtgagctacctgtgtgatctggcaccagaggccccacctcctacgttaccccccgatatggcacaagtgacggtagggccaggacttcttggagtatccacactgggtcctaagcggaattcgatggtcctggatgtggcttttgtcctcgaggggtccgacaaaataggcgaggccgacttcaaccgttccaaggagttcatggaagaggtgatacaaagaatggacgttggccaggactcaatacacgtaacagtgctgcagtattcctatatggtaactgtggaatatccattttcagaggctcagtcaaagggcgacatcttgcagcgagtaagagagatccgatatcagggggggaatcgcaccaacacggggctggcactgcgatatctctctgatcatagctttctggtttcccaaggggatcgggaacaggctccaaatttggtttatatggtaaccggcaatcctgcctccgatgagataaagcggctgcctggagacatccaggtagttcccatcggagtcggccctaacgcaaacgtgcaggaattagagcggatcggttggccgaacgccccgatcttgatccaggatttcgagactctgcctagggaggctccagatctggttctccagcggtgttgtagtggcgaggggctgcagattcctactctctctcccgctccggactgctcccagcctctcgacgttatattgctgctggacgggtcctctagctttcctgccagctatttcgacgaaatgaagagttttgctaaagccttcatctccaaggcaaacatcggccccagattgacccaggtgagcgtcctgcagtacggttcgatcaccaccatcgatgttccgtggaacgttgttcccgagaaggcgcaccttctgtcactagtggacgtcatgcagcgagagggtggtccatcacaaattggcgacgccctaggctttgccgtgaggtatctcacatctgaaatgcacggggcgagaccaggcgcctctaaagcggtggttatcctggtgacggatgtctctgtggacagcgtcgatgctgccgccgatgcagcccggagcaaccgggtcaccgtctttccaatcggtatcggagaccggtatgacgcagctcagctgagaatactggctggcccggctggagactccaacgttgttaaactgcagagaattgaggacttaccaacaatggtgaccttaggcaattcttttttgcacaagctctgcagcgggttcgttagaatctgtatggatgaggatggcaatgaaaagagacccggggacgtgtggaccctgccagaccagtgtcacacagtgacctgtcaacctgatggccagaccctgctgaaatcccacagagtgaattgcgatcgcggattgcgtccgtcctgcccaaacagccagtctccagttaaagtggaggaaacctgtggctgtagatggacctgcccttgtgtgtgtacaggaagtagcacaagacacatcgtgacttttgacgggcagaacttcaaattgacgggttcttgctcatacgtgctttttcagaataaggagcaggatctggaggtgatcctccacaacggagcttgttcaccaggtgcgagacaaggatgtatgaagtccatcgaagtgaagcacagtgccctgtctgtcgaactgcattccgatatggaggtgaccgtgaacgggcgattagtatccgtgccctatgtgggcgggaatatggaggtaaacgtgtatggtgccattatgcatgaagtgaggttcaatcacctggggcatattttcactttcaccccccagaacaacgaatttcaactgcagctttctcctaagacctttgcctccaagacatatggcttgtgcgggatctgtgatgaaaatggcgcgaacgattttatgttgcgggatggcacagttaccaccgactggaaaaccctggttcaggagtggaccgtgcagcgcccaggtcagacttgccaaccgattctggaggaacagtgcctggtgcctgattcctcccattgtcaggtactgctgttgccactgtttgcggagtgccacaaggtcctggcaccagcgaccttctacgcgatctgtcagcaggattcttgccaccaggaacaggtctgcgaggtgatcgcctcatatgcacacctctgtaggaccaacggcgtgtgcgtagattggcggactcccgacttttgcgcaatgtcatgcccaccctctcttgtctataaccactgcgagcatgggtgtccacgccattgcgacgggaatgtgagttcttgcggcgaccatccgagtgaagggtgcttctgcccccctgacaaggtgatgctcgaggggtcctgcgtgccggaggaagcttgcacacagtgtataggagaggatggggtgcaacatcagttcctggaagcctgggtgccagaccatcagccctgtcagatttgcacttgtctgtctggccgcaaagtgaactgtaccacccagccatgcccgaccgcgaaggcaccaacttgcgggctttgcgaggtggcacgcttacgccagaatgctgaccaatgttgcccagagtacgaatgtgtttgcgacccagtgtcctgcgacctgcccccagtacctcactgcgagcggggcctgcagcccaccctgacaaatcctggcgagtgtaggccgaactttacttgcgcatgtcgaaaagaagagtgtaaaagggtctcccccccgagctgtccaccccacagactgccaaccttgcggaaaacacaatgctgtgacgagtacgaatgcgcatgtaactgcgtaaacagcacggtgagttgccctctgggatatctggcctccactgccacaaacgattgcggatgcaccacaaccacttgtcttcctgataaggtctgcgtgcacagatcaacaatttatccagtcgggcagttttgggaagaggggtgcgacgtctgtacatgcaccgacatggaagacgccgtgatgggtctgcgagtggcgcagtgctcacaaaaaccgtgcgaggatagctgccggagtggttttacctatgtgctccatgagggcgaatgctgcgggcggtgtctgccatccgcctgtgaggtcgtcactggctcgcctcggggtgacagtcagagctcctggaaatccgtcggtagtcagtgggccagtcctgaaaacccctgcttgattaacgaatgcgttcgtgtgaaagaagaagtgtttatacagcagcggaatgtgtcttgcccacagttagaagtgcccgtgtgccccagcgggttccagctgtcttgtaagacatctgcctgttgcccgtcttgccgatgtgagcggatggaggcttgtatgctcaatggaactgtgattggtccaggcaaaacagtaatgatcgatgtgtgcacgacatgtcggtgcatggttcaggtgggtgtgatctctgggttcaaacttgaatgcagaaaaactacatgcaatccttgtccgctaggatataaggaggagaataataccggcgagtgttgcggcagatgtctacccaccgcctgtactatccagcttcgcggtggccagatcatgactctgaaaagggacgagaccctgcaggacggatgtgatacccatttttgcaaggtgaatgagagaggagaatacttttgggagaagcgggttaccggttgcccaccatttgacgagcacaaatgtttggccgaaggaggcaagattatgaaaatacctggaacatgttgtgacacatgcgaggagccggaatgtaatgacataacagctagactacagtatgtgaaggtgggaagctgcaagtctgaagttgaagtagatattcactattgccaaggcaagtgcgctagcaaggccatgtactctatcgacatcaacgatgtccaggatcagtgctcttgctgtagcccaacgcggacagagccaatgcaggtagcactgcattgtaccaacggctctgtcgtttatcacgaggtgctcaacgctatggagtgcaaatgctccccacgtaagtgctccaag

SEQ ID NO: 21387 - DNA, 8439 bp, synthetic construct
  misc_feature 1..8439: note = source = /note="Description of Artificial Sequence: Synthetic coding sequence"
  source 1..8439: mol_type = other DNA
atgattcctgccagatttgccggcgtgctgctggcgctggccctgattctcccaggaacgctgtgtgccgaaggaacacggggtaggtccagtactgcgcgctgtagcctgttcggtagcgactttgtcaataccttcgacggcagcatgtattcctttgccggttactgctcttatctgttggcgggaggatgccaaaagaggtcctttagcatcataggagattttcagaacggcaagagggtctccttgtccgtgtatttgggcgagttcttcgacattcacctgttcgtgaatggaacagtgacacagggggaccagcgggtctcaatgccttacgccagtaagggtctctatcttgaaaccgaagcaggctactataagctctctggggaggcttacggcttcgtcgcgcggatcgacggctccgggaattttcaggtcctgctctctgatcggtatttcaataagacatgcggtctgtgtggcaactttaatattttcgccgaagatgatttcatgacacaggagggtacattgacgagcgatccttatgacttcgccaatagctgggccctgtcctctggcgaacaatggtgtgaaagagcgtccccccccagtagctcctgtaacatctcttccggcgagatgcagaagggtctgtgggagcaatgccaactgctgaagtcaacctctgtgttcgccaggtgccacccccttgtcgaccctgagccgttcgttgcgctctgtgaaaagactctgtgcgagtgtgcaggcggactcgagtgtgcatgtcctgcgctgctggagtatgctaggacttgcgctcaggagggaatggtgctgtacggttggacagatcactctgcttgttctccggtgtgcccagctggtatggaatatagacagtgtgtcagcccgtgcgcccgaacgtgtcagagccttcatataaacgaaatgtgccaggagagatgcgtggatggttgttcatgcccggaaggacagctgctggacgaaggcctctgtgtggagtctaccgagtgcccctgcgtgcactctgggaagcggtacccaccaggcaccagtctgtcccgggattgtaatacctgtatctgtcgaaactcacagtggatttgcagcaatgaggaatgtcccggtgaatgtttggtaactggccagagccatttcaaaagtttcgacaatagatattttacatttagtggcatctgccagtatctcctcgccagggactgtcaggatcactcctttagcattgtcatcgagactgtacagtgtgcggacgaccgcgacgctgtgtgtacccggagtgtgacagtccggctgcccgggcttcataattccctcgtcaaactgaaacacggggcaggcgtagccatggatggtcaggatgtgcaactgccgttgctgaaaggcgatctgaggatccagcacacggtgactgcatcagtcaggctgagctacggggaggaccttcagatggattgggacggccgcggcaggttgctcgtgaagttgtcccccgtctatgctggaaaaacctgcgggctctgtggtaactacaatggcaatcagggggacgacttcttgacaccctctggccttgccgagcccagagttgaggactttggcaacgcgtggaagttgcatggcgactgccaggaccttcaaaagcaacatagcgatccctgtgccctgaatcctcggatgacccgcttcagcgaggaggcttgcgccgttctgacatctcctactttcgaagcctgccaccgggcggtatctcctctgccctaccttcggaattgcagatacgatgtgtgtagttgttcagacggccgagagtgcctgtgcggtgccctggcatcttacgccgctgcatgcgctggcaggggggtcagagtggcctggcgggagcctggtcgatgtgaacttaattgccctaaggggcaagtatatttgcaatgcggaactccttgcaatctgacatgtcgcagtttgtcttatccagatgaggaatgcaacgaggcctgcctcgaggggtgcttctgtccccctgggttgtatatggatgagcggggggattgtgtgcctaaggcccagtgcccatgctactatgacggcgagatcttccagcctgaggacatctttagtgaccaccacacaatgtgttattgtgaggatgggttcatgcattgcactatgagcggtgtgcctgggtccttgctgccagatgccgtgctcagtagccccctctcccacaggtccaagcggagcctctcctgccgccctcccatggtaaaactcgtgtgcccagccgacaacctgcgcgccgagggcttggagtgtacgaaaacttgccaaaactatgacctggagtgtatgtccatgggctgcgttagcggatgcctctgtccacccggcatggtgagacacgaaaaccgctgtgttgcactcgaacgctgtccttgctttcaccaggggaaagaatatgcaccaggggagactgtcaagatcggctgtaatacctgcgtgtgtcaggacaggaaatggaactgtaccgaccatgtctgcgatgccacctgctccacaatcggaatggcccattaccttacctttgacggcctcaagtacctctttcctggggaatgtcagtacgttctggtccaagattattgcggatctaaccccggtaccttccggatcctcgtgggtaataaaggatgctctcaccccagcgtcaaatgtaagaagcgcgtgacgatcctggtggaaggtggcgaaatcgagctgtttgacggcgaagtgaatgtgaaaagacccatgaaagacgaaacacacttcgaggtcgttgagagcggaagatatattatccttttgctgggaaaggctctttctgtggtttgggatcgccacctctccatctccgtggttctgaagcagacctaccaagagaaggtttgtgggctctgtggaaacttcgacggaatccagaataatgaccttacaagcagcaacttgcaggtggaagaggatcccgtcgacttcggtaacagttggaaagtgagctcccagtgtgcggatacccggaaggtgcccctggactcctctcccgcaacatgtcataacaacatcatgaagcaaacaatggtggattcctcttgtcgaatcctgacatctgatgtgtttcaggactgcaataagctggtggacccagagccatatctggacgtctgcatttacgacacctgttcctgtgaatccatcggcgactgcgcttgtttttgcgacacaatcgccgcatacgctcatgtctgcgctcagcatgggaaggtggtcacgtggaggacggccacactctgccctcagagttgtgaggagagaaacctgcgcgagaacggctacgaatgtgaatggcgctataacagctgtgcccccgcttgtcaagtgacctgtcagcaccccgaaccactggcctgccctgttcagtgcgttgaggggtgtcatgctcattgtcccccggggaagatactggacgagctgctccagacatgcgttgatcccgaggattgccctgtctgcgaggtggctgggcggcggttcgcctctgggaaaaaggtcactctgaacccatctgacccggagcactgtcagatttgtcattgcgatgtggtgaacttgacttgcgaggcatgccaggagcccgggggcctggtcgtgccgccaaccgatgctcccgtgagcccaaccactctgtacgtagaagatattagcgaaccccctctgcacgatttctactgcagtcggctcctggatcttgtattcctgctcgacgggagttctcgcttgagcgaagcggagtttgaggtgctgaaggcatttgtggtggatatgatggaaaggctgagaatcagccagaagtgggtccgcgtcgccgtggtggaatatcacgatgggagccatgcttacattggcctgaaagaccgaaagcgcccctctgagctgcgcagaatcgcaagccaggtgaagtacgccggcagtcaggtggcaagcacaagcgaggtgctgaagtacacgctgtttcaaatattttccaagattgatcggcctgaggcctcacgcattaccctgctcctgatggcctcacaggaaccccaaagaatgtcacggaattttgtgagatatgtgcaaggtctcaagaaaaagaaggtgatcgtcattcccgtaggcatcgggccccacgcgaatttgaaacagatccggctgattgagaagcaggcaccagaaaacaaggcctttgttcttagttccgttgacgaattggaacagcagcgagacgaaatagtgtcctatctgtgcgatttggcccctgaggcccctcctcctacgcttccccccgatatggcacaggtcacagtggggcctggactcctcggcgtgtccacactggggccaaagcggaactctatggtcctggacgtcgctttcgtactcgaaggaagcgacaagattggagaggccgacttcaacagatctaaagaattcatggaggaggtgatccagcggatggacgtcggccaagatagtattcatgtcactgtcttgcagtacagctatatggtgacggtggagtacccgttcagtgaggcccagtctaagggggatattctccagagggtccgagagatccggtaccaaggggggaaccggaccaacactgggttggctctgaggtaccttagcgatcattccttcctggtgtcacagggcgacagggagcaggcccccaatctcgtctacatggttactgggaaccccgcaagcgatgagatcaagcggttgcccggagatattcaagtggtaccaattggcgtgggtcccaatgcgaacgtgcaggagttggaacgaatcgggtggcccaatgcccctattcttatccaggatttcgaaactcttccccgggaggcccccgatctcgtgctgcagaggtgttgctctggtgagggattgcagataccgaccttgtccccggctccagattgcagtcagcccttggacgtgatactgttgctggatggctcatcttcctttcctgcaagctattttgacgaaatgaagtcatttgcaaaagccttcatttctaaggcgaatataggaccaaggctgacccaagttagcgtgctccagtacggttcaatcaccacaattgatgtaccttggaatgtggttcccgagaaggcccacctcttgtccttggttgacgtgatgcagcgagagggaggccctagccagattggtgacgccctcggcttcgctgtccgctacctgacgtctgagatgcacggtgcacgaccgggcgcctctaaggcagtggttattctcgtcacggatgtgagtgtggatagtgtggatgcagccgccgatgcggcaagatctaatcgagtgaccgtcttccccatcggtatcggagaccggtacgacgcagctcagctgcgcattctggctggcccagccggtgactctaatgtcgtgaaactccagaggatcgaagacctgcctaccatggtgaccctgggaaactctttcctccacaagctgtgctccggttttgtccggatttgtatggacgaagacggtaatgaaaagagacccggggacgtgtggaccctgccggaccagtgtcacaccgtaacttgtcagccggatggccaaacattgctgaaatcccatcgagtcaactgcgacagagggctcagaccttcctgcccgaactctcagtcacccgttaaggtggaggagacatgtggatgtagatggacctgcccttgcgtttgcactggatctagtacaaggcacattgttaccttcgatgggcaaaattttaaactgacaggatcctgcagctatgtgttgtttcaaaacaaggagcaggaccttgaggtcatcctgcataacggcgcctgttctcccggcgcgcggcagggctgtatgaagagtatcgaggtaaaacactcagccctgtccgtggaactgcattccgacatggaagttactgtcaacggcaggctcgtgtcagtgccctatgtgggcggaaatatggaggtcaatgtctacggcgccatcatgcacgaggtacgcttcaaccatctcggccacatcttcacatttactcctcagaataatgagtttcagctgcagttgagtcccaaaacctttgccagtaaaacctatggtttgtgcggaatctgtgacgagaatggggctaatgactttatgcttagggacggcacagtcacgactgattggaaaactcttgtccaggagtggacagtgcaaaggcctggccagacctgtcagcccatactggaggagcagtgcctcgtgccggattcatcccactgtcaagtgcttctcctgccgctgtttgcagaatgccataaggttctcgcgccggccacattctatgcaatttgtcagcaggatagttgccaccaggagcaggtctgtgaggtgattgcctcatatgcgcatctctgtcggaccaatggcgtctgtgtggattggcgcaccccggacttctgtgcgatgtcatgcccgccctccctcgtgtataatcattgtgagcatggctgcccccggcactgtgacggaaatgtgagctcatgcggcgatcacccaagcgaagggtgtttctgccctccagacaaagtgatgctggaagggagctgtgtcccagaggaggcctgcacgcagtgcatcggcgaagacggcgtacagcaccagtttctggaagcttgggtccctgaccaccaaccttgtcagatctgtacatgtctgtctggtagaaaggtaaattgcacaacccagccttgcccaaccgctaaggcacccacctgtggactctgtgaagtggcccggctccggcagaacgccgaccagtgctgtccagaatatgagtgtgtctgcgaccctgtctcctgcgatctgcccccggtgccccattgtgagaggggtctccagcctacactcactaacccaggggaatgtaggccaaatttcacttgtgcttgccggaaggaggagtgtaagagagtgagccccccttcttgtcccccacaccggctccccacactgcggaagactcaatgctgcgacgagtacgagtgtgcatgcaattgcgtcaatagtacagtgagctgtcctctcggttatctcgcatctacagccacaaacgactgtggatgtacaactacaacctgcctgcctgataaggtgtgcgtgcaccggtctacaatctatcccgtggggcaattttgggaggaagggtgcgacgtatgtacctgtacagacatggaggacgccgtgatgggcctgagagtagcccaatgttcccaaaaaccctgtgaggactcctgtagaagcggctttacctatgtccttcacgagggagaatgttgtggtcgctgtctgccgtccgcgtgtgaagtggtgacaggatctccccgcggggacagccagtctagctggaaaagcgttggcagccagtgggccagccctgaaaatccatgtcttattaatgagtgcgtacgcgtgaaagaggaagtgtttattcagcagagaaatgtttcctgcccgcaactcgaggttcccgtgtgtcctagtggatttcagctgagttgcaaaaccagtgcgtgctgtccatcctgccgatgtgaaagaatggaagcttgcatgctcaatggcactgtcatcggaccggggaagactgtgatgattgacgtctgtacaacttgcagatgtatggtacaagtgggggtcatttctggctttaagctggaatgcaggaaaacgacgtgcaacccctgcccactgggttacaaggaggagaacaataccggtgaatgttgcggtaggtgcctgccaactgcatgcaccattcagttgaggggggggcagattatgactttgaaaagggacgaaactctgcaagacgggtgcgatacccatttttgtaaggtcaatgagcgcggagagtatttctgggaaaagcgcgtgaccggttgtccaccttttgatgaacacaagtgtctcgccgagggtggtaagatcatgaaaattcctggaacatgttgtgacacatgcgaggaaccagagtgcaacgacattaccgcacgattgcagtacgtgaaggttggatcatgcaagagcgaggtcgaagttgacatccactattgtcaaggtaaatgtgcatctaaggccatgtacagtatcgatatcaacgatgtgcaagaccaatgctcatgttgctctccgaccagaacagagccaatgcaagtggctttgcactgtacgaacgggtctgtggtgtatcacgaagtgctgaacgctatggaatgcaagtgttccccaagaaaatgttctaaa

SEQ ID NO: 21388 - DNA, 8439 bp, synthetic construct
  misc_feature 1..8439: note = source = /note="Description of Artificial Sequence: Synthetic coding sequence"
  source 1..8439: mol_type = other DNA
atgatccccgccagattcgcgggagtactgctcgctctggcacttattttacccgggacactctgcgcagaagggactagagggcggtcttccactgctaggtgctccctctttgggagtgatttcgtgaatactttcgatggatccatgtatagtttcgctgggtactgctcctacctacttgcaggaggatgccagaaacggagtttttccatcattggggacttccagaacggaaagagagtgagtttatcagtgtacttaggagaatttttcgatatacacctcttcgtgaatggaacagttacacagggagatcagcgggtaagtatgccatacgcctcaaagggactttatttggaaactgaagcaggatactataaattatctggggaggcctatgggtttgtggcaaggatcgacgggtcagggaactttcaggtccttctctccgatcggtacttcaataaaacttgcggactatgtgggaatttcaacatattcgccgaagatgactttatgactcaagaggggactctaacttccgatccttacgattttgcaaatagttgggccctctcgagtggggaacagtggtgcgagcgcgcctctccaccctcgtcctcatgcaatatttcaagtggggaaatgcaaaaaggactctgggaacagtgccagctcctcaaatccacgtctgtatttgctaggtgtcaccctttagtcgatcccgaaccattcgtcgcattgtgcgaaaaaacactttgtgaatgtgccggaggactcgaatgcgcctgtcctgcacttttggaatatgccagaacatgtgcccaggaagggatggtgctctacgggtggactgatcattccgcatgttcgccagtgtgtcccgcggggatggagtatcgacagtgcgtttcaccttgcgctagaacttgccagtctctgcacattaacgaaatgtgccaggagcgctgcgtggatgggtgttcttgccctgaagggcagctgctggacgaagggctctgcgtcgagtccacagagtgtccatgtgtgcactcaggaaaacgatatccccctggaacatccctgtctcgggattgtaacacatgtatctgtcgaaattcacagtggatctgtagtaatgaagaatgcccaggagaatgtttggtgacagggcagtcccactttaagagtttcgataatagatactttacattcagtggaatctgccagtatttactcgccagggactgccaagatcattctttttctatagtgattgaaactgtacagtgtgctgacgatcgggatgctgtttgtactagaagtgtgacagtaagactaccagggttgcacaacagtctggtgaaactgaagcatggggccggagtggccatggatgggcaggatgtgcagttaccacttctaaaaggagatcttaggatacagcatacagttacagcttccgttaggctctcttatggggaggatctccagatggattgggatgggcggggacgccttttagtgaaactaagtccagtgtatgcagggaagacatgtggactctgcggaaattataacgggaatcagggggatgattttctcacacctagtgggctggccgaaccacgggtggaagatttcggaaacgcttggaaactgcacggggactgccaggaccttcagaaacagcattctgatccctgcgctctcaacccaaggatgactaggttttctgaggaagcttgtgctgtgctcactagtcctacattcgaagcctgtcatagagccgtttcaccactcccttatctcagaaactgtcggtacgatgtttgcagttgctcagatgggcgggagtgtctctgcggggctctggcctcttatgccgctgcctgtgctggacggggagttagggttgcatggagggagcctggacggtgtgaactaaattgccccaaagggcaggtctacttacaatgcgggactccctgtaatctgacatgcagatcactcagttatcctgatgaggaatgtaacgaggcttgcctggaagggtgtttttgccctcctgggttatacatggatgagcggggggactgtgtgcccaaagcccagtgcccctgttattatgatggggaaatcttccagcccgaagatatattttccgatcaccacactatgtgctactgcgaagatgggtttatgcattgtacaatgtctggggtgcccgggtctctccttcccgatgctgtactatcttctcccctgtctcatcgctccaaaagatcactttcctgtaggcccccgatggtaaaactagtctgccctgctgataacctcagagccgaaggactcgaatgcactaaaacatgtcagaactatgatctcgagtgtatgtccatggggtgtgtgtccgggtgtctttgtccacctgggatggtgcggcacgaaaatagatgtgttgcacttgaaagatgtccatgttttcatcaggggaaagagtacgcccctggagaaacagtcaaaataggatgtaatacatgcgtgtgccaggatcgcaaatggaactgcacagatcatgtgtgtgatgctacatgctctacaatcggaatggctcattatctgacatttgatggactcaaatatctcttccccggagaatgtcagtatgtgctagtccaggattactgtgggagtaatccaggaacttttcgtatccttgtggggaataaagggtgctcacacccctctgtgaaatgcaaaaaacgggtgacaatcctggtagaaggaggagaaatcgaacttttcgatggagaagtgaatgttaaaaggcccatgaaggatgaaacacacttcgaagtggttgaatccggaagatacatcatcctgcttctcgggaaggctctctctgtggtatgggatagacacctctcgatttccgtggttcttaagcagacttatcaggaaaaagtctgtgggctctgtggaaattttgacggaatccagaacaacgaccttacaagttcaaatctgcaggtggaagaagatcctgttgatttcgggaattcctggaaggtgtcttcccagtgtgctgacactagaaaagtacctctcgattcatcccccgccacttgtcacaataatattatgaaacagactatggtagattccagttgcaggatcctcacttccgatgtttttcaggattgtaacaaactagttgatcccgaaccatatcttgatgtatgtatttatgatacttgttcatgcgaatccattggggactgtgcttgcttctgtgatactatcgcagcatacgcccacgtctgcgcccagcacgggaaagtcgtgacttggagaacagcgactttatgtcctcagtcatgcgaagaaagaaacttacgagaaaatggatatgaatgcgagtggcgatataattcctgtgctcctgcctgccaggttacgtgccagcatcccgaaccactcgcgtgtcctgttcagtgtgtggaagggtgccatgcccactgtcctcccgggaaaattcttgatgaactactccagacttgtgtcgatcccgaagattgcccagtatgtgaagttgccgggcgacgctttgcatctgggaaaaaagtaactcttaatccatccgatcctgaacattgccagatctgccattgtgatgtggtgaatcttacatgcgaggcttgtcaggagcctggaggactggtagtcccccctactgatgcgcctgtctctccaacaacgctatatgtcgaggatatatcagaaccccccctgcacgatttttattgctcaagactcctagaccttgtattcctcctcgatgggtcatctcgactaagtgaagccgagttcgaagtgttgaaggccttcgtggtcgacatgatggaacgcctaaggatatcacagaaatgggtgagggttgctgtcgtcgaataccatgatggatctcatgcatatatagggcttaaagaccggaaaagaccctctgaacttaggcgaatagcgagtcaggtgaaatatgctggatctcaggttgcctcaacttccgaagtgctaaaatatactctctttcagatattctctaaaatagatcggccagaggctagtagaataacacttttgctgatggcgtcccaagaaccccaacgaatgtccagaaattttgtgaggtacgtgcaggggttaaagaaaaaaaaagtaattgtcatccctgttggaattggacctcacgcaaatttaaaacagatccggcttattgaaaagcaggcccccgagaacaaagcctttgtactctcctcagtcgatgagctagaacagcagcgcgatgaaatcgtgtcatatctgtgtgatctagcacccgaagccccccctcccacattacctccagacatggctcaggtgactgtggggccggggcttttaggagtttctactcttggacccaaaaggaactctatggtgctagatgtggcatttgtacttgaaggaagtgataaaattggggaagctgacttcaatagatcgaaggaatttatggaagaggtgatacagcgcatggatgtggggcaggactcgatccatgtgactgtgctacagtattcttatatggttactgtagaatatcccttttctgaagctcagtctaaaggggatattcttcagcgagtcagagagataagataccagggggggaatcggacaaacacagggctcgcacttcggtacctgtccgatcattcattcctggtatctcagggagatcgcgaacaggcccctaacctggtgtatatggtgactgggaacccagcttcggatgaaattaaacggcttcctggagatatccaggtcgttcctataggagtagggcctaacgctaatgtgcaggaactggaacggataggatggcccaatgccccaatcttaatacaggatttcgaaactctcccccgggaggcaccagatctggtactacagcgatgctgttcaggagaagggctccagattccaacactctcccccgccccagattgcagtcagcccctagatgtgatactacttctcgatgggtcttccagtttccctgcctcttatttcgatgaaatgaaatcctttgcaaaggcctttatatctaaggccaacatcgggccacggctaactcaggtgtccgtgctccagtatgggtcaattacaacaatcgacgtgccctggaacgttgtgccagagaaagcacacctcctcagtctcgttgatgtgatgcagagagaaggagggcctagtcagatcggagatgctctcggatttgcagtacgctatttgacttcagaaatgcacggagctcggcccggggccagtaaggctgtggtgattcttgtaacagatgtgtcagtggattcagttgatgcagccgctgacgccgctaggagtaacagggtaacagtatttccaatcggaataggagataggtatgatgctgcacaactccggatccttgctggaccagctggggattcaaatgtggttaagttacagagaatagaagatcttcctacaatggtaacattagggaattcttttctacataagctgtgttccgggttcgtgcgcatatgcatggatgaggatggaaacgagaaaagacctggggatgtatggacactcccagatcagtgtcatactgtaacttgtcagcccgatggacagacacttctaaaatctcacagagtgaactgcgataggggactcaggcccagttgtcccaactcacaatcaccagtaaaggtagaagaaacttgtgggtgtagatggacttgcccttgtgtctgtactggatcatccacacggcacatagtcacattcgacggacagaatttcaaactgactggatcgtgtagttacgttttatttcagaacaaggaacaggacctcgaggtgatcctgcataatggggcctgctctccaggagcgagacagggatgcatgaaaagtatcgaagtaaaacatagtgcactgagtgtagagcttcactcagacatggaggtgactgtgaatggacgcctcgtgagtgtgccttatgtcggagggaacatggaggttaacgtgtatggggccataatgcacgaagtccgcttcaatcatctgggacatatctttacatttacaccccagaacaatgaatttcagctccagctctcccccaaaactttcgctagtaaaacatatggactgtgcgggatttgcgatgaaaatggagcaaatgattttatgcttagagatgggactgtaacaactgactggaaaactttggttcaggaatggactgttcagcggcccgggcagacatgccagcctatccttgaagagcagtgtctcgttcctgacagtagtcactgccaggtgctactcctccccctgttcgccgaatgtcacaaagtcttagctccagccactttttatgcaatctgtcaacaggattcttgccatcaggaacaggtgtgcgaggttatcgcctcttacgcacacctctgccgcactaatggagtttgtgtggattggagaacacctgatttctgcgcgatgtcctgtcccccttcactcgtgtataatcactgtgaacatgggtgtcctagacactgtgacggaaatgtttcctcctgtggagaccatccatcggagggatgcttttgtccgcctgataaagtcatgctcgaagggtcatgcgttcctgaagaagcatgcactcagtgcataggagaagatggggttcagcatcagtttcttgaggcctgggttcccgaccaccagccttgtcaaatctgtacttgtctatccggaagaaaggtgaattgcactacacagccttgtcctacagccaaagcccccacatgcggactctgtgaggtggccagattgagacagaacgctgatcagtgctgccccgaatatgaatgtgtttgcgatccagtttcttgtgaccttccacccgtgcctcattgtgaacggggactacagcctacactcacaaacccaggggagtgcaggcccaatttcacatgtgcctgcaggaaagaagaatgtaagcgggtgagtccaccctcatgtcccccacacagactccccacactacgcaaaacacagtgctgtgatgaatatgaatgcgcgtgtaactgcgttaactccacagtgagttgccccctggggtatctcgcttccactgcaacaaatgactgtgggtgtactactactacatgtctgcctgataaagtgtgtgtccaccggtccactatatatcctgttggacagttttgggaagaagggtgcgacgtttgtacatgcacagatatggaagacgccgtgatggggctgcgggtggcacagtgtagtcagaaaccctgtgaagattcctgcaggtccggattcacttacgtcttacacgaaggggaatgctgtggacggtgcctcccctctgcctgcgaggtggtcacagggagtccccggggagatagtcagtcttcctggaaaagtgtggggtctcaatgggcctcccctgaaaatccctgtctaattaatgaatgtgtacgagtcaaagaagaagtttttatccagcagcggaatgtttcctgccctcagcttgaagtgcctgtgtgcccctccggattccagctgtcttgtaagacgtctgcttgctgtcccagttgcagatgcgaaaggatggaggcgtgtatgcttaacggaacagttatcggacctgggaaaacagtaatgattgatgtgtgcacaacatgccggtgtatggtgcaagtgggagtgattagtggattcaaattagaatgtcgaaaaactacatgcaatccttgtccactcgggtataaagaagagaacaatactggagaatgttgtggacgctgtcttcccacagcttgtacaatccagctgcgcggggggcagattatgactctgaaacgcgatgaaacactacaggatgggtgcgatactcacttttgtaaggtgaacgaacggggagagtatttttgggaaaaacgagtcactgggtgccccccattcgatgaacataaatgtctcgccgaaggaggaaaaattatgaagataccagggacttgctgtgatacttgcgaggaacccgaatgcaatgatataacagctagattacagtatgtgaaagtgggatcttgtaaatctgaggtcgaagtcgatatacactattgccaggggaagtgtgcctctaaagcgatgtattccatagatatcaacgatgtccaagatcagtgtagttgttgcagtcctacaaggactgaacccatgcaggtggccttacattgtacaaacgggtccgtggtgtatcatgaagtgttaaatgcaatggaatgcaaatgctctcctaggaagtgttccaaa

SEQ ID NO: 21389 - DNA, 8439 bp, synthetic construct
  misc_feature 1..8439: note = source = /note="Description of Artificial Sequence: Synthetic coding sequence"
  source 1..8439: mol_type = other DNA
atgatacccgcaaggtttgctggggtactattggctctcgctctgattctgccaggtaccttgtgcgccgaagggacacgaggcaggtccagcacagctagatgctctctttttggcagcgatttcgttaatacttttgacgggtctatgtattcattcgccggctattgtagctatctgctggccggaggttgtcagaaaagaagcttctcgatcatcggagacttccagaacggaaagagagtctctttgtccgtgtacctaggcgaattttttgatatccacttattcgtgaacggaaccgtgacccagggtgatcagagggtgtcaatgccctatgcctctaagggtctatatctcgagaccgaagctggatactacaagctaagtggggaagcctacggattcgtggcaaggatcgatggaagcgggaatttccaggtgctcttatccgatcgttattttaataagacctgtggcctgtgcggaaacttcaatatatttgccgaggatgattttatgacccaagaaggtactttgacatcggacccatatgacttcgccaattcatgggctctgtcttcgggagaacagtggtgtgagagagcctcccctcccagctcctcctgcaatatctcatccggcgagatgcagaaaggactgtgggaacagtgtcagctgttgaagagcacatcggtctttgcccgttgccaccccctggtagacccagaaccctttgtggccctttgcgaaaagacactgtgcgaatgtgctggtggactggagtgcgcttgcccagccttgcttgagtacgcccgcacctgtgctcaagaaggcatggttttatatgggtggaccgaccactccgcctgttcgccagtctgtccagctggcatggagtacagacaatgcgtgagcccttgcgctaggacatgtcagtctcttcatatcaatgagatgtgccaggagaggtgtgtagacggatgcagttgccccgagggacagctgttggatgaaggcctgtgtgtcgaaagtaccgagtgcccctgtgtccactcaggcaaaaggtatccacccggtacatccctgtcgcgagactgcaatacttgcatctgccgtaatagccaatggatttgttccaatgaagagtgtccaggcgagtgtctggtgacaggccagtcccactttaagtcatttgacaacagatacttcacctttagcggaatttgccagtacctcctggcccgagactgccaagaccatagcttcagtatcgtgatagaaaccgtgcagtgcgctgacgaccgagacgcggtgtgcactagatccgtgacggtcaggctgcccgggcttcataatagcctggtgaaactgaaacatggcgcaggagtggcaatggatgggcaggacgttcaactgccactgcttaaaggcgacctgagaatccagcacactgtcactgcatcagtccgactgtcttacggtgaagacctgcagatggattgggatggtagaggcaggctactggttaagttaagcccagtatacgccggcaaaacctgcggactctgtggcaattataatggtaaccagggtgatgattttctgacaccgagtggcctcgccgaacctagggtcgaggacttcggcaacgcgtggaagctgcacggagactgtcaggatttgcagaagcagcatagtgatccgtgcgccctgaatcctagaatgacgaggttcagcgaagaagcatgtgcagtgctgacaagtccaacatttgaagcgtgtcaccgcgctgtgtccccactgccctatctgaggaattgtaggtatgacgtgtgctcttgctcggatgggcgagaatgcctgtgcggggctctggctagttacgctgccgcctgtgcaggtcgaggcgtccgggtggcttggagagaacctgggcgttgcgaattgaactgtcctaaaggtcaggtttaccttcagtgcggcacaccatgcaacttgacctgtcgttccctcagctaccctgacgaggaatgcaatgaggcctgcctggagggatgcttctgtccccctggcctttatatggatgagcgaggcgattgcgtcccaaaggcccagtgtccctgctactatgacggcgaaatatttcagcctgaggacatattctcagaccaccatactatgtgttactgtgaagatggattcatgcactgtaccatgtcaggcgtgcccggcagcctgttgcccgacgctgtcttgtctagccctctttctcatcgaagcaagaggtccctctcatgccgtccccccatggtgaaactcgtatgccctgcggataatcttcgggcagagggattagaatgcacaaagacttgtcagaactacgatttagaatgcatgagtatggggtgtgtctccggctgcctttgtcctcccggtatggtgcggcacgaaaaccgatgtgttgccctggaaaggtgcccttgtttccaccaggggaaagagtacgctcctggagagacagtgaagattggatgcaatacgtgcgtgtgtcaggatagaaagtggaattgtacagatcatgtgtgcgatgccacttgtagtactataggcatggcacattacctgaccttcgatggccttaagtatctattccctggcgaatgccagtatgtgctggtgcaagattattgtggctccaatcctggaacgttccgaattttggtcggaaacaaaggttgcagccatcctagtgtaaagtgcaagaaaagagtaaccatccttgttgagggcggagaaattgagcttttcgatggagaggtaaacgtgaagagaccaatgaaagatgagactcactttgaagtggtcgagtctggtagatatattatccttctgcttggtaaggcactgtctgtggtgtgggatcgccatctgagtatttccgtagtactcaagcagacctaccaggaaaaggtctgtggtttatgtgggaattttgatggaattcaaaacaacgacctgactagctccaacctgcaggtcgaagaggaccccgtggatttcgggaactcatggaaggtcagctcccagtgtgcggacacccgaaaggtacctctggattccagccctgcaacttgccataataatattatgaagcagactatggtggactcatcctgccgaattctcaccagtgacgtgttccaggattgcaacaagttggtggaccccgagccatacctggatgtgtgtatttacgacacatgctcctgtgagtccattggcgactgtgcatgtttttgtgatacgatagccgcctacgcccacgtgtgcgctcagcacggtaaagtggtgacttggaggacagcaaccctgtgccctcaaagctgcgaagagagaaatctcagggaaaacgggtatgagtgcgagtggcgatataacagttgcgcccccgcgtgccaggtgacatgtcaacacccagaacctttggcttgtcctgtgcagtgtgtagaaggctgtcatgctcactgtccacccggcaagatattggacgaacttctgcagacttgtgtcgaccctgaagactgcccagtttgtgaggttgccgggaggcgttttgctagtggaaaaaaggtcactctaaatccttctgatcccgagcactgccagatttgtcactgtgacgtggtgaatctgacatgtgaggcctgtcaagaacccggtggcctggtggtgccccctactgacgcccccgtaagccccactacattgtatgtcgaagacatcagcgagcctccactccatgatttctactgtagccgtctgctagatttggtttttctgttggacggttccagcaggttaagtgaggccgagttcgaagtgttgaaagccttcgttgttgacatgatggaaagactccggatcagccagaaatgggtgagagtggccgtcgtcgagtaccacgacggttcccacgcgtatatcgggctgaaggacaggaaaaggccgtctgaactgagaaggatcgcttctcaggtcaagtatgctgggagccaggtagcctccacctctgaggtgcttaagtataccctgttccagattttttcaaaaatagataggccagaagcatcacggattaccctccttctgatggccagtcaggagccccagaggatgagcagaaacttcgtaaggtacgtgcaaggcctgaaaaaaaagaaggttatcgtcatccctgtgggaatcggaccacacgcaaatttgaaacaaatacgactgatcgagaagcaggccccagaaaataaggccttcgtgctttccagcgttgatgagctggagcagcagcgcgatgagatagtctcttacctctgtgatctcgctccagaagccccaccccctacccttccaccagacatggctcaggttacagtgggtccaggtttactgggcgtctcaacccttgggcccaagcgcaactcaatggtcttggatgtggccttcgtgctcgaagggtccgacaagataggggaagccgacttcaataggtcgaaggagttcatggaggaggtgatccagcgaatggacgtcggccaagattccatccatgtgacagtcctgcaatattcatatatggttacagtggagtaccctttcagcgaggcccagtccaagggcgacatactgcaaagggtgcgtgagattcgctaccaaggggggaatcgtaccaataccggattagccttgcgatacctgtcagaccactcatttttggtctcccaaggcgacagggagcaggcgcccaatcttgtttatatggtcaccgggaaccctgcctccgacgagatcaagcgattgcccggcgatatccaggtggtcccaattggagtaggacccaacgcaaacgtccaggagctggaaagaataggctggcccaatgctcccattctcatacaagattttgagaccctccctagggaagcacctgaccttgtgttgcagcggtgttgttcgggcgagggacttcagattcccaccctgtcacctgccccagactgcagccagccactcgacgttatcctgctgcttgacggttcttcctctttccccgcctcctacttcgatgaaatgaagagctttgcgaaagcctttatttcgaaggcaaacatcggacccaggttaacacaggtgtctgtacttcagtatggctctataacgacgatcgatgtgccgtggaacgtcgttcccgagaaagcacatctgctaagtttggtggacgtgatgcagagagagggaggaccatcccagatcggtgatgccctgggctttgccgtccgatacttgacctcggaaatgcacggcgcacgaccaggcgcgtctaaggcagtggtgatcttggtgaccgacgtgtctgtggactctgtggacgccgctgcggatgcagccaggtccaaccgagtaaccgtctttcccatcgggattggcgaccggtacgacgcagctcagctgagaatactggcaggccctgcaggagacagcaacgtggtcaagctgcaacgaattgaagatcttcccacaatggttaccttaggtaattcgttcctgcacaagttgtgctcaggattcgtaagaatttgcatggacgaagatggcaatgaaaaaagacctggcgatgtctggactttacctgatcagtgtcacaccgtaacctgccagcctgacggtcagaccttactaaaaagccatcgtgtcaactgcgacaggggtctgagacccagttgtcctaattcacagtcccctgtgaaagttgaggagacttgcggatgccgatggacatgtccctgcgtttgcactggctccagtaccaggcatatcgtgacattcgatggccaaaatttcaagcttactggctcttgttcatacgtgctttttcagaacaaggaacaagatctcgaagtcatcctgcacaatggcgcttgcagtcccggcgcccgacagggatgcatgaagagcattgaggttaagcacagcgccctgtctgtggagctccattctgatatggaggtaaccgtcaacggtagactggtgtccgtgccttatgtcggcggtaacatggaggttaatgtgtatggggccataatgcacgaggtgagatttaatcacttggggcatatctttactttcaccccccagaataatgagttccaacttcagctttcccccaagacgtttgccagtaagacttacggcctatgcggtatatgcgacgagaacggcgccaacgattttatgctcagggacggcactgtcaccaccgattggaaaaccctggtgcaagagtggactgtgcagcgacccggacagacctgtcagccaatcctcgaagaacaatgtctggtgcccgattccagccattgccaggtgctgctgctgcccctgttcgccgagtgccacaaagtcctggccccggccacgttctacgctatttgtcagcaagatagctgccatcaggaacaggtctgcgaggtgattgcatcatatgcccacttatgtagaacaaatggcgtgtgcgtcgactggcggaccccggatttttgcgctatgtcttgtccccccagtctggtgtataaccattgtgaacatggctgtcccaggcactgtgacgggaacgtgtcttcatgcggtgatcacccaagcgagggttgcttctgccctcctgataaggtgatgctcgaaggttcgtgcgtgcctgaagaagcctgcactcaatgcattggagaagatggggtccaacaccagttcctggaggcttgggtgcccgaccaccagccatgccaaatctgtacttgcctaagcgggaggaaggtgaattgcaccacccagccctgtccgacagcgaaagcgcctacttgtggactgtgtgaagtggctcgactgagacaaaatgcggaccagtgttgtcccgagtatgaatgcgtgtgcgatcctgtgtcttgcgatctcccccctgtcccacactgtgagcgcgggctgcagccaactctgacgaatcccggagaatgtaggcccaactttacttgtgcctgtagaaaggaagaatgcaaaagggtgagccctcccagctgcccaccacaccggttgcccacccttcgaaagactcagtgctgtgacgaatatgagtgcgcatgcaattgcgtaaacagcacggtcagctgccccttaggatacctcgctagcacagcaacaaacgactgtggctgtaccacgactacttgtctccctgataaagtctgcgtgcaccgcagcacaatttatccggtgggccaattctgggaggaagggtgcgacgtttgcacttgtactgatatggaggacgctgtcatgggcctgcgagtggcacagtgttcacagaaaccttgcgaggattcttgccgatccggcttcacgtatgtgctgcacgaaggcgaatgttgcggtcgatgtctgccatcggcctgtgaagtcgtcactggaagcccacggggggacagccagagttcatggaagagcgtaggaagccagtgggcctcccccgaaaacccatgtctaattaatgaatgtgtgagggtgaaagaagaggtgtttatccagcaacgaaacgtgagctgtccacagttggaagtgccagtctgcccatcaggcttccaactgtcttgcaaaacatctgcctgctgcccaagctgtagatgcgagcgaatggaggcttgtatgctgaatgggaccgtgatcggaccaggaaaaactgtaatgatagacgtgtgtactacatgtagatgtatggtgcaggtgggagtcatcagcggattcaagctagaatgtagaaaaacaacttgtaatccctgcccactgggctacaaagaagagaacaatacaggcgaatgttgcggtcgctgcctccctacagcctgcacaatccagctacggggtggccagatcatgactctgaagagggatgagactttgcaagatggttgcgacacccacttctgcaaggtcaatgaaagaggtgagtacttctgggagaagagggttaccggctgccctccctttgatgaacataagtgtctggctgagggaggtaaaattatgaagattcccggcacctgttgcgatacttgtgaagagcctgagtgtaacgatatcaccgcacgattacagtacgtaaaggtcggcagctgtaaatccgaagtggaggtggacatccattactgccagggaaaatgtgcgtcaaaggcgatgtatagtatcgatataaacgatgtgcaggaccagtgttcctgttgcagcccaacccgaactgaaccaatgcaggtagcattacattgcacaaacgggagcgtggtgtatcacgaagtgctgaacgctatggagtgcaaatgctcccctagaaaatgttctaag

SEQ ID NO: 21390 - DNA, 8439 bp, synthetic construct
  misc_feature 1..8439: note = source = /note="Description of Artificial Sequence: Synthetic coding sequence"
  source 1..8439: mol_type = other DNA
atgataccagcccggttcgccggcgtccttctggcactcgccctgatcctaccgggaacactgtgcgccgagggcacgcggggccgttctagcacagctcggtgcagcttatttggaagtgacttcgtgaacactttcgacgggtccatgtacagctttgccggttactgtagttacttactggcgggaggctgccagaagcggtccttcagtataatcggggacttccagaatgggaaacgggtgagcttgtcagtctatctgggagagtttttcgacatccatcttttcgtgaacggcacagtgacccagggggaccagagggtttcaatgccttacgcctcaaaaggcctgtacttagagacagaggctggatattataaattgtccggcgaggcttatgggttcgtggcgcgtatagatgggagtggaaatttccaggttctcctaagtgacaggtacttcaataagacttgcggcctgtgtgggaactttaacatctttgctgaagatgatttcatgactcaagagggtacgctcacatctgacccctatgacttcgcgaattcatgggcgctaagttctggggaacagtggtgtgaaagggcaagcccaccctcttccagctgcaatatctcatctggagagatgcagaagggcctttgggagcagtgccagctcctcaagtccaccagtgtctttgctagatgccacccccttgtggatcctgaacccttcgtcgctctgtgtgagaagacgctgtgcgagtgtgccggtggcttggaatgtgcctgtcctgctctgctcgagtatgccagaacctgtgctcaggagggaatggtgctttatgggtggactgaccactcagcatgctccccggtgtgtcccgccggaatggagtatcgccagtgtgtctcaccgtgtgctcggacctgtcagtctctacacataaacgaaatgtgccaggagcgctgtgttgatggctgcagctgtcccgagggacagctactggatgaaggactttgcgtcgagagcaccgagtgtccttgtgtccactctggaaagcggtatccccccggtacctccctgagtcgggactgtaatacctgtatctgtcgtaacagccagtggatatgttcgaacgaagagtgccccggcgagtgtctggtgacaggccagtcccattttaagagcttcgataatcggtacttcactttctctggaatctgccagtacctgctcgcccgggactgccaagaccattccttcagtattgtaatagagacggtgcagtgtgctgacgatagagacgctgtgtgcactaggagcgtcacagtgcgactaccaggacttcataattctctggtcaagctcaagcatggggccggagtcgcaatggatgggcaggatgtgcagctccctctgttgaaaggagatctcaggattcagcacaccgtaacggcttctgtccgtctgagttacggcgaggatttacagatggactgggatgggagggggcggttactggtgaagctgtcgcccgtctatgccggaaaaacatgtggtctttgcggtaactataacggaaatcagggtgacgatttcctgactccaagcggcttagccgaaccccgagtggaggatttcggcaacgcttggaaattgcatggggattgccaagacctccaaaaacagcactcggacccatgcgctctcaatcccagaatgacccgattctccgaagaagcctgtgctgtattgacatcacctaccttcgaggcatgtcatcgagcagtgtctccgcttccctatctgagaaactgtcggtacgatgtatgcagttgttctgatggacgtgagtgcttgtgtggagcgctggcctcatacgcggccgcctgcgctggacgcggagtgcgcgtggcttggagagagcccggccggtgcgaacttaattgcccaaagggccaggtgtatctccagtgcgggacgccctgtaaccttacgtgtaggagtctgtcttatcctgatgaagagtgtaacgaagcttgtttggagggctgtttttgtcctcccggcctgtatatggacgaaagaggcgactgtgttcccaaagcccagtgtccatgctactatgatggtgagatctttcagcccgaagacattttttcagaccatcacacaatgtgctattgtgaagatggcttcatgcactgcactatgtctggcgtcccaggatctctgctccctgacgccgtgctctcttctccactgagccaccggagtaagcggtccctgtcttgtcggccgcctatggtgaagctcgtgtgtcccgccgataacctgcgcgcagaggggctggaatgcactaagacttgccaaaattatgacctggagtgtatgtcaatggggtgtgttagcggatgcctatgcccccctgggatggtcagacatgaaaacagatgtgtggcccttgagagatgcccctgcttccatcaggggaaagaatatgctcctggtgagacagtgaagatcggctgtaacacgtgtgtgtgccaggaccggaaatggaattgcacggaccacgtttgtgacgcgacttgctctacaatcgggatggctcactatttgacatttgacgggttgaagtacctgtttcccggggagtgccaatatgtgttagtacaggattactgtgggtctaatcctggtactttcagaattctcgttggaaacaagggatgcagccatccttctgtcaaatgcaagaagcgtgtgactatcctagtggagggaggagagattgaacttttcgatggcgaggtcaacgtcaagcggcccatgaaggatgagacccacttcgaggtcgtagagtcagggaggtacatcattctgctcctcggcaaagcactgagcgtggtgtgggatcgccatctctctattagcgttgtgctcaagcagacttatcaggagaaagtgtgcgggctgtgtggaaattttgacgggatccagaataacgacctgactagcagcaatctccaggtagaagaagatccggtcgatttcggtaatagctggaaggtgtcatcacaatgtgccgatacaagaaaggttccactcgactcttcccccgctacctgccataataatatcatgaaacaaactatggtggatagtagctgccgcattcttacatcagatgtttttcaggattgcaacaagttggtggaccctgaaccatatctcgatgtgtgtatttacgatacatgctcatgcgagagcataggcgattgtgcttgtttttgtgacaccatagccgcctacgcacatgtgtgcgcacagcacggaaaggttgttacctggcgcacagcaaccctttgtccgcagtcgtgcgaagagcggaatttacgggaaaacgggtacgagtgcgaatggcgctacaattcatgcgcaccggcatgccaggtgacgtgccagcacccagaacctcttgcgtgtcccgtgcagtgcgtggagggatgtcacgcgcattgccctccaggaaagattcttgacgagctccttcaaacttgtgtggacccggaggactgcccggtttgcgaagtggccgggcggcgctttgcgtcaggaaagaaagtcactcttaaccccagtgacccagaacactgtcagatatgccattgcgatgtagtaaatttgacatgcgaggcatgccaggagccgggaggattggtggtacctccaaccgatgcccctgtcagtccgaccactctgtacgtagaggatatctctgaaccccccctacatgatttctattgttcacgcttgctggacttggtgttcctgctggacgggtcttcgcggctgtcagaggctgagttcgaagtcttgaaagcttttgtggtggacatgatggaaagactccgcattagtcagaagtgggtcagagtggcagtggtcgagtaccacgacggatcacacgcttatattggtcttaaggatcgcaagcgaccaagtgaacttcgcagaatcgcttcccaggtgaaatatgccgggagtcaagtggcttcaactagtgaagtgctgaagtatacgctgtttcagatctttagcaagatagatcgtccggaggccagccgtataaccctgctgctgatggctagtcaagagccccagaggatgagccggaatttcgtacgctatgtgcaagggctcaagaaaaaaaaggtgatcgtcatcccagtggggatcgggccgcacgccaatttgaagcagattcgattaatcgaaaagcaggcacccgaaaacaaggcgtttgtgctgtcatctgtggatgagcttgagcagcagcgagacgaaatagtgagctacctgtgtgatctagcacctgaggccccaccccctaccctcccacctgatatggctcaagttacagtcggaccaggcctcctgggcgtctcgacgttgggacccaaacgcaacagcatggtcttagacgtggccttcgttctcgagggatccgacaaaataggggaggcagatttcaacaggagcaaagagttcatggaggaggtcatccagagaatggacgtgggccaggattcaatccatgtgactgtactacagtattcttatatggtgactgttgagtatcctttctccgaggcccagtccaagggcgacatcttacagagagttcgcgaaatccgctatcagggtggcaaccggactaatacaggtctcgcactcaggtaccttagcgaccattccttcctcgtctctcagggagaccgcgagcaagcacccaatctggtgtacatggtcaccggcaacccagcatcagacgaaatcaagcggctgcccggcgacatacaggtagtccccatcggcgttggaccgaacgcaaacgtgcaagaacttgagcggatcggttggcctaacgccccaatcctgatccaagactttgaaactctgccccgcgaagcgcccgatcttgtgctgcagagatgctgctcgggggaaggactccagatcccaacactgtctccggctcccgactgcagtcaaccactcgatgtgatcctactactggatgggtcgagcagcttcccagcatcttacttcgacgagatgaaatcgtttgccaaagcttttatcagtaaagcgaatattggcccacggttgacccaagtgtcagtgttgcagtacggttcaatcaccaccattgacgtgccctggaacgtcgtccctgagaaagctcaccttctcagcctggtcgacgtgatgcagagagaaggaggcccaagtcagattggggatgctttgggctttgcggtgcggtacctaacgtcagaaatgcacggagccaggcctggagcctccaaggcagttgtgatacttgttaccgacgtttcagttgatagtgtcgatgccgcggctgacgcagccaggtccaacagggtgactgtgtttcccatagggatcggggatcggtacgatgcagcccagctgcggattctcgcaggacccgctggtgatagtaatgtggtgaagctgcaaaggatagaagacttgccgacaatggtgaccctgggaaactcattcttgcacaagctgtgtagcggcttcgtgcggatttgcatggatgaggacgggaatgaaaaacgacctggagacgtgtggacccttcctgatcaatgtcatacagtaacctgtcaacctgacggtcagaccctgctgaaaagccaccgggtgaactgtgaccgcggcctccgaccttcctgtcccaacagccagtcacctgtgaaggtcgaggagacgtgtggttgtcgttggacctgtccatgtgtatgcaccgggagcagcacacggcacattgttactttcgacggtcagaactttaagcttacggggagttgcagctatgtattgtttcagaataaagagcaggacttagaagttattctgcacaacggcgcgtgcagccccggggctcgacagggatgcatgaaaagtattgaagtgaaacatagcgctctatctgttgagctccacagtgacatggaagtgactgtgaacgggcgattagtgtcagtaccatacgtgggaggcaatatggaagtgaacgtgtacggcgcgattatgcacgaagtgcggtttaaccacctggggcatatcttcacatttaccccccagaacaacgaattccagctccagctgtctccaaaaacatttgcctctaaaacatacgggctgtgcggaatttgcgacgagaacggcgcaaatgacttcatgctccgtgacggcacagtgaccaccgactggaaaaccctggtacaggagtggacggtgcaacgcccgggccagacatgccagcctatcctggaggaacagtgcctggtccccgattcttctcattgtcaggtgctgttgcttcctctgtttgcagagtgtcataaagtcttggcgcctgccacattttatgcaatctgtcagcaagattcctgtcaccaggagcaggtgtgtgaggtgattgcttcctatgctcatctatgcaggacaaacggggtgtgcgtggactggagaaccccggatttctgtgcgatgtcatgccccccttccctggtttacaatcactgcgagcacggctgtccaaggcactgtgacggtaatgtgagctcgtgtggcgatcacccctcagagggatgcttctgtccccccgacaaggtaatgctggaaggctcttgcgtacctgaggaggcatgcacccagtgtattggcgaggacggtgttcaacaccagtttctcgaagcctgggttccggatcaccaaccctgtcagatctgcacctgcttgtctgggcgcaaggtgaactgcaccactcagccatgcccaactgcaaaagccccaacatgtgggttgtgcgaggttgccagactgagacagaacgccgatcagtgctgcccagagtacgagtgtgtttgcgacccagtgtcctgcgacttgccccctgttccacactgtgaaaggggactacagcccacactgacgaatcccggtgaatgcagacctaattttacttgtgcctgccgcaaggaggaatgcaagcgcgtcagcccgcccagttgcccccctcataggctgccaaccttgaggaagacccaatgttgtgacgagtacgaatgcgcctgtaattgcgtaaactcgactgtctcatgtccactaggctacttagcctccaccgcgacaaacgactgtggatgcaccaccacaacctgtctgcctgataaagtgtgtgtccaccggtccactatttaccctgtcgggcagttttgggaagagggatgcgatgtctgcacttgcaccgacatggaggatgcagtgatgggtctgcgcgtggctcagtgcagccagaaaccatgcgaagattcttgcagatcgggattcacatacgttctccatgaaggggagtgttgtggtcgatgcctgcccagtgcatgtgaggtggtaaccggctctccccgaggggactcacagtctagctggaaatctgtaggaagtcagtgggcgagtcccgaaaatccctgtctcataaacgagtgcgtgcgcgtgaaggaagaggtcttcattcagcagcggaatgtcagctgtccccagctcgaggttcccgtctgtccatctgggtttcagctgtcatgtaaaacctccgcctgttgtcctagttgccgctgtgagagaatggaagcctgtatgcttaacggtacggtaatcgggcctggaaaaacagtcatgatcgacgtctgtaccacctgcaggtgtatggttcaggtgggtgtcataagtggttttaaactggagtgtcgaaagaccacctgcaatccatgtccactcggctacaaggaggagaacaataccggtgagtgttgcgggcgctgcctgcccacggcatgcacaattcagctcagaggcggccagatcatgaccctgaagagggacgagaccctccaggacgggtgcgacacccacttttgcaaagtgaacgaacggggggagtatttttgggaaaaaagggtaaccggatgtccaccattcgacgagcacaaatgtctggccgaaggcggcaaaataatgaagattccaggcacatgttgtgacacttgtgaggagcctgagtgcaatgatattactgcacggttacaatatgtgaaggtagggtcctgcaagagcgaagtggaggttgacattcattactgccaaggtaaatgcgccagcaaggccatgtactctatagacattaacgacgttcaagaccaatgttcttgttgcagccccacgaggacggaacccatgcaggtggctctgcactgcacgaacgggagcgtcgtttatcacgaagtcctgaatgctatggagtgtaagtgctctccaaggaagtgctctaag

SEQ ID NO: 21391 - DNA, 8439 bp, synthetic construct
  misc_feature 1..8439: note = source = /note="Description of Artificial Sequence: Synthetic coding sequence"
  source 1..8439: mol_type = other DNA
atgattcctgcaagatttgctggcgtgcttctggccctagcgttaatcctgccaggcacgctttgcgcagagggcacccgggggcgcagcagtactgccaggtgctcactttttgggtcagacttcgtgaacacattcgatgggagcatgtactcattcgcggggtactgtagctacctgctggccggtggatgccagaaaaggagcttctccattattggcgacttccaaaacgggaaaagggtttccttatcagtgtacttgggcgagttctttgatatccacctgtttgtcaacgggaccgtgacccaaggcgaccagcgtgtatcaatgccatatgcgtccaagggcctttacctcgaaacggaagctggttactacaaactgagcggagaggcttatgggtttgttgctaggatcgacggcagcggaaatttccaggtgttgctgtccgaccgctatttcaacaagacatgcgggctctgcgggaacttcaacatcttcgcagaggacgactttatgacacaagagggaaccctgacttcagatccctatgactttgcaaacagttgggccttgtcaagcggggagcagtggtgtgagagggcttctcctccctccagttcatgtaacatatcaagcggggagatgcagaaaggcctgtgggagcagtgtcaactccttaaatcaacaagcgtctttgcacgatgtcatcccctggtggatcctgagcccttcgtagccctttgcgagaagacactgtgcgagtgcgccggcggactggagtgtgcttgtcctgcactgctcgaatatgctagaacatgcgcacaggaggggatggtcctgtatggctggactgaccattccgcctgtagtcccgtttgccctgccggcatggagtatcggcaatgcgtttccccgtgcgcaaggacctgtcagagtctgcatatcaatgagatgtgtcaagagcgctgcgtcgatgggtgcagttgcccagaaggacagctgcttgatgaaggactgtgcgtcgagtcgactgagtgtccgtgcgtgcattcagggaaacggtacccaccaggcacatccctgtcccgagattgcaatacctgtatttgccggaattctcagtggatctgctctaatgaggaatgccccggggaatgtcttgtcacaggccagtctcatttcaagtctttcgataatagatatttcaccttctcgggtatttgtcagtacttgttagcccgggactgccaggaccacagctttagtatcgtgatcgaaaccgtccagtgtgctgatgatcgagacgcagtgtgtacacggagcgtcactgtacgtcttcctggattacacaactccttggtcaaactcaaacacggcgctggcgtcgcgatggatggccaggatgtacaactgccactgttaaagggggacttaaggatccaacacactgttactgcgtcagttcgcttgtcttacggcgaagatctccaaatggactgggatggtagaggacggctccttgtgaagctgagccccgtgtacgcgggcaaaacttgcgggttatgtgggaactacaatggcaaccagggcgatgatttcttgacgcccagtggactcgccgaacctagggtggaggattttggaaatgcctggaagctacatggggattgccaagacttgcagaagcagcactcagatccttgtgccctgaaccctagaatgaccaggttttctgaggaagcttgcgcggtgttaacaagcccaacgttcgaagcgtgtcacagagccgtctcccctctgccctatctgcgcaattgtcgctatgatgtctgttcatgctccgacggccgcgaatgtctttgtggcgcgttggccagctatgccgccgcgtgcgcgggaagaggcgtccgcgtggcctggagagagccaggccgctgcgagctaaattgtccgaaaggccaggtgtatctgcagtgcggaacaccatgcaacctgacatgtcgtagtctgagctaccccgatgaggaatgcaacgaggcatgcctggaaggctgcttctgtcccccaggcctctatatggacgagcggggagactgcgtacccaaagcccaatgtccgtgttattacgacggagagatctttcagccagaggatatcttcagcgaccaccacacgatgtgctattgtgaggacgggtttatgcactgtactatgagcggggtcccaggatccctactacccgatgcagtgctgtcttctcccctctcgcaccgcagcaagcggtccctctcatgccgaccacctatggttaagctggtgtgcccagccgataaccttagggccgaaggacttgagtgcaccaagacctgtcaaaactatgatctggagtgtatgtcaatgggctgcgttagcggttgcctgtgcccaccgggcatggttcgccatgaaaataggtgcgtcgcactggagcggtgcccatgtttccaccagggaaaagagtacgctccaggggagacagtaaagatcgggtgtaatacatgcgtgtgtcaggatcgcaagtggaattgcactgaccacgtgtgcgacgccacatgctcgaccatcggcatggcccactacctgacgttcgacggccttaaatacctgtttcctggggaatgccagtacgtgctcgtacaagactattgtggctcaaaccctggcacctttcgaatcctcgtgggtaataaggggtgttcccacccttcagtcaagtgcaagaagcgtgttactatactggtggagggaggggaaattgagctgtttgatggagaagtaaacgtgaagcgaccgatgaaagatgagacacactttgaggtggttgagtccgggcgctatatcatactcctgctcggcaaagcgctgagcgtggtttgggataggcacctgtccattagtgtagttctaaagcagacttaccaggaaaaagtgtgcggtttgtgcggaaacttcgatggcattcagaacaacgatctcacgagctctaatctgcaagtggaagaggatccagttgacttcggcaattcttggaaggtttcgagtcagtgcgctgatacacgcaaagtgccactcgatagttcgccagccacctgccacaataacatcatgaagcaaactatggttgactccagttgcaggatcttgacttccgatgttttccaggattgtaacaagcttgtcgaccccgaaccgtacttggacgtatgcatctacgatacctgctcatgcgagtccatcggtgattgcgcctgcttctgcgatactattgcagcatatgctcacgtttgtgcccaacatggcaaggtggtgacttggcggactgccaccctgtgtccccaatcgtgcgaagagagaaacttgagagaaaacggctatgagtgtgaatggcgatacaatagctgcgcccccgcttgtcaggtgacatgccagcatccagagcctctagcttgtcctgttcagtgtgtggaggggtgtcacgcacactgtccccccgggaagatcctcgacgaactgctccagacgtgtgtagatccagaagattgtccagtgtgcgaagtagcgggccgacgtttcgcttccggcaagaaggtgactctgaacccctcagaccctgagcactgccagatttgccactgcgacgtagtcaacctcacatgcgaagcttgccaggagcccggcggcctggtggtgccaccaaccgacgccccggtgagccctacgaccctgtacgtcgaggacatttcggagcctccgcttcatgacttttactgttcccggctgttggacctcgtgttcttgctggacggatcctcacgactttcagaggccgagtttgaagtgctaaaagcctttgtggtggatatgatggaaagattgaggatatcacagaaatgggtacgcgtggcagtcgtggagtaccacgatgggagtcacgcctacattggtctcaaggatcgtaagcgcccatccgaactcagacgcatagctagtcaggtcaaatacgccgggagccaggtggcttcgaccagcgaggtacttaaatacaccctgtttcagatcttttctaagatcgatcggcccgaagcttccaggatcactctgcttctgatggcctcacaggaaccgcagcgcatgagtagaaactttgtaaggtacgtacagggtcttaaaaaaaagaaggttatagtcatcccagtggggattggtccccacgccaatttgaagcagatccggctgattgagaaacaagccccagaaaataaagcatttgtgttatcttcggttgatgagctggaacagcagcgggacgaaattgtaagttacctttgcgacctcgcaccagaggcgcccccgccaaccctaccacccgacatggctcaagtaacagttggcccggggcttctcggcgtgtctacactgggaccgaagagaaattccatggtgttggatgtcgcgtttgtgctggagggctctgataaaatcggcgaggccgatttcaaccggtcgaaggaatttatggaggaagtgattcagagaatggatgtgggccaggactccatccatgtcacagttcttcaatacagctacatggtgactgtggaatatcctttctctgaagcacagtcgaaaggggacatccttcaaagggtccgtgagattcggtaccagggcggcaatcggaccaataccggcctggccctgaggtatttatccgaccactctttcctggtgtcccagggagaccgcgagcaggctccaaacctggtctacatggtgactggtaacccagcatccgacgaaattaagcggttgccaggcgacattcaagtggtcccaattggggttgggcccaacgctaatgtgcaggaattggaaaggatcgggtggccgaatgccccaattctgatccaggatttcgaaaccttgccacgagaagcgcccgatctcgttttacagcggtgctgtagcggcgagggcctgcagattccaacgctttcacctgcccccgactgctcccagcccctggacgtaatactgctgcttgacgggtcatcgtcatttccagccagttattttgatgagatgaaatcgtttgccaaggccttcattagcaaagctaacataggtcctcgcctcactcaggtgtcagtgctgcagtacggttccatcaccacaatcgacgttccttggaacgtcgtccccgaaaaggcacatctcttgtcattggttgacgtcatgcaacgcgaaggcgggccctcacaaattggggacgcccttggcttcgcagtgagatatttgacttctgaaatgcacggcgcaagaccgggcgcaagcaaggctgtggtgatactcgttacagacgtatcagtggattcagtagacgccgccgctgatgccgcgcgttctaaccgtgtcaccgtgttcccaatcggcataggcgaccgctatgatgctgcccaattgaggatcctggccggacccgccggcgacagtaacgtcgttaagttacagcggatcgaggaccttcctacaatggtcacactaggaaactcgtttcttcataagctgtgctccggctttgtgaggatctgtatggacgaagatggtaacgaaaagcgcccgggggacgtttggacattgcccgaccaatgccacacggtgacctgccagcccgatggtcagaccctacttaagagccatagggtgaattgtgaccgcgggcttaggccttcttgtccaaattctcagtctcccgtgaaagtggaagaaacctgcggctgccgttggacttgtccatgtgtctgcacggggagttctacccggcacattgttaccttcgatgggcaaaactttaagctgacgggtagctgtagctatgtcctcttccagaacaaagagcaggatctcgaggtgatactgcataacggcgcatgttctccaggagcccgtcagggctgcatgaaaagtatagaggttaaacacagtgccctgagcgttgaactgcacagtgatatggaggtgaccgtaaatggccgactggtgtcggttccatatgttggcggtaacatggaagttaacgtgtacggggccattatgcacgaagtaagattcaatcacctgggtcatatctttacattcacacctcagaacaacgagtttcaactccagctgtcacccaagacgttcgccagcaaaacttatggcttgtgtgggatctgtgacgagaatggcgcaaacgactttatgctgagagacgggacagtaactactgactggaaaactctggtgcaggaatggacagttcaaaggccaggccagacgtgccaacctatactcgaagagcagtgtttggtgcctgactccagccactgtcaggtgctcttgctgcccctctttgcggagtgtcacaaggttctggcgccagccacattctatgcgatatgtcaacaggatagttgccatcaggaacaggtgtgtgaagtaatagctagctacgctcacttgtgccgaacaaatggtgtgtgtgtggactggcgcactcctgatttttgcgccatgagctgcccacctagcctcgtctataaccattgtgaacacggctgccccaggcattgcgacggcaacgtatcctcatgcggtgaccatccatccgaagggtgtttttgcccccccgacaaggtcatgctggagggaagctgtgtgcctgaagaggcttgcacccagtgtatcggcgaggatggagttcagcatcagttcttagaagcttgggtgccagaccaccagccttgccaaatttgcacatgcctgagcggcagaaaagtcaactgtaccacacagccttgtcctactgctaaagcacctacatgcggactctgtgaagttgcccggctcaggcagaacgcggatcagtgctgtcctgaatatgagtgtgtctgcgatcccgtgtcctgcgatcttccaccggtgccacactgtgagaggggactgcaacccacactgacaaatcccggagagtgccggccaaacttcacgtgcgcatgtcggaaagaagaatgcaagcgagtaagtcccccgtcttgccccccacaccggctccccactctccggaaaactcagtgctgcgacgagtatgaatgcgcgtgcaactgcgtgaacagcacggtctcttgccctctgggctatcttgccagtaccgctacaaacgactgtggctgtaccaccacaacatgcctgccggacaaggtgtgcgtgcacaggagcaccatctaccccgtggggcagttctgggaagaaggttgcgatgtctgcacttgtacggatatggaggatgccgtcatggggcttagggttgcccaatgtagccagaagccctgcgaggacagctgccgatctggttttacttatgtgctccacgagggtgaatgctgcggaagatgcctacccagtgcctgcgaggttgtgaccggctctcctcgaggagactcacagtcttcctggaaatccgtcggaagccaatgggcgtcccccgaaaacccatgtctgataaatgaatgcgtgcgagtgaaggaggaagtgtttattcagcaaagaaatgtttcttgtccccagctggaggtgccagtgtgcccctctggattccaattgtcatgcaagacgtcagcttgctgtccttcgtgccgctgcgaaaggatggaggcctgcatgttgaacggaacggtcatcggccctgggaagacagttatgattgatgtgtgcactacctgcaggtgtatggttcaggtgggtgttattagcggatttaagttggagtgtagaaagacaacatgcaacccatgcccactggggtacaaagaagaaaataacacgggagagtgctgtggaagatgtctccctactgcttgcactatacagttgcgggggggacagatcatgacgctcaagagagatgaaacccttcaggatgggtgtgacactcacttttgcaaggtgaatgaacgcggggaatacttttgggagaagcgcgttactggttgccccccgtttgatgagcacaagtgcctggccgagggcggaaaaataatgaagatacccggaacgtgctgcgatacttgcgaagaacctgagtgcaatgacataacagcccgccttcagtatgtcaaagtgggctcatgtaaatccgaggttgaggtcgatattcactattgtcaagggaagtgtgcatcgaaagctatgtactccattgatatcaatgacgtgcaggaccagtgttcttgctgttcaccaactcgcacagagcctatgcaagtggctctccactgcaccaacggatctgtggtgtatcacgaagtgctgaatgccatggagtgtaagtgtagccctaggaagtgctcaaag

SEQ ID NO: 21392 - DNA, 8439 bp, synthetic construct
  misc_feature 1..8439: note = source = /note="Description of Artificial Sequence: Synthetic coding sequence"
  source 1..8439: mol_type = other DNA
atgattccagctcgatttgcgggagttcttttggctcttgctcttattctaccgggcaccttgtgcgcagagggaactcgaggtcgtagttcaactgcgagatgttccttgttcggttccgatttcgtcaacacgttcgatggatcaatgtacagttttgctggatactgttcatacctccttgcaggcggctgccaaaaacgatcgttcagcattatcggagactttcaaaatggaaagcgagtttccctcagtgtatatttaggtgagttctttgacattcatcttttcgtaaatggcactgttacacaaggtgaccagcgtgtatcaatgccctatgcttcaaaaggactttatcttgaaactgaagcaggatactataaactctctggagaggcatatggcttcgtcgcgcgtattgatgggtcgggtaactttcaagttcttctttctgatcgttattttaacaagacgtgcggactttgcggaaacttcaatattttcgcagaagatgattttatgacccaagaaggtacactgacatctgatccgtatgacttcgccaacagctgggcattatcctctggagagcaatggtgtgagagagcatcgcctccgtcgtcaagttgcaacataagttcaggagaaatgcaaaaaggcctgtgggaacaatgccagttgctgaagtccacaagtgtttttgcacgttgtcatccacttgtggatccagaaccgttcgtagctttgtgtgagaaaactctttgcgaatgtgctggtggactggaatgcgcatgcccagcactccttgagtatgcacgtacttgtgcacaagaaggtatggtcctgtatggatggacagatcatagtgcttgtagcccagtgtgtccagccggaatggagtaccgacagtgcgtttcgccttgcgcacgtacgtgtcagtctctccatattaatgaaatgtgccaggaacgatgtgttgatggctgctcctgcccagagggtcaattacttgacgaaggactttgtgtcgagtcaacagaatgtccatgtgtgcattcgggtaagcggtatccaccgggaacctcactttccagagattgcaacacctgtatctgccgtaactcgcaatggatatgtagtaatgaagaatgcccgggagaatgcttggtgacaggccaatctcatttcaaatccttcgataaccgatattttacattttcgggaatctgtcaatacctgttggcgcgagattgccaagatcactcattctccattgtgatcgaaacagttcaatgcgccgatgatagagatgctgtttgtacgagatcagttacagtccgtttacccggccttcataacagccttgtcaagttgaagcacggagctggagtggctatggatggacaagatgtacaattgccacttctcaaaggtgatcttcgtattcaacataccgttactgcatctgttcggctttcatacggagaagatcttcaaatggactgggatgggaggggtcgtcttctggtcaaattgagccctgtttacgcaggaaagacctgcggactttgcggaaattataatggtaaccaaggggacgatttccttactccgtctggtttggcggagccacgagtagaagatttcggaaatgcatggaaattgcacggcgattgtcaagaccttcaaaagcaacattccgacccgtgtgctttgaatccgagaatgactcgattttcagaggaagcatgcgctgtcctgacatctccaacattcgaggcctgccatcgtgcagtctcgccacttccatacttgagaaattgcaggtatgatgtttgctcatgttccgatggtcgtgaatgcctttgcggtgccttggctagttacgcagctgcttgtgcgggaagaggggtgagagttgcttggcgtgaaccaggccgttgtgaacttaattgcccaaaaggtcaggtgtatctgcaatgtggtactccatgcaatttaacttgtcgttccttgtcgtatccggatgaagaatgcaatgaggcttgcttggaaggttgcttctgcccgcctggactttatatggacgagagaggcgattgtgttcccaaggcacaatgtccatgttactacgatggagaaatcttccaaccagaagatattttttcagatcatcatactatgtgttactgcgaggatggtttcatgcattgtactatgtccggagtaccaggatcactgctaccagacgctgtgctttccagtccattgtctcatcgttcaaagcggagcctttcttgcaggccaccaatggtgaagctcgtgtgcccagccgataatctccgcgctgaaggactagagtgcaccaaaacatgtcaaaattacgatttggagtgcatgtccatgggctgtgtgtctggatgcttgtgtccaccaggaatggttcggcatgaaaatcgttgtgttgcccttgaacggtgcccgtgctttcatcagggtaaagagtatgcaccaggtgagaccgttaagattggatgcaatacttgtgtttgtcaagatagaaaatggaactgtaccgatcacgtttgcgatgctacttgctccactatcggtatggcacattatctgactttcgatggacttaaatacttattcccaggagaatgtcagtatgtcctggtgcaggattactgcggctctaatccgggaaccttcagaattcttgttggaaacaagggatgctcccatccaagcgtcaaatgcaaaaaaagagtaacaattttggtggaaggaggagagatcgaactttttgacggcgaggttaatgtgaagagacctatgaaagatgagactcatttcgaggttgtggaatccggtcgatatatcatactcctcttaggtaaagccctttctgtggtgtgggatcgacacttatcaatttccgtagtactcaagcagacttatcaggaaaaagtctgcggtctttgtgggaatttcgacggaatacagaacaacgatcttacgagttctaacctccaagtggaagaagatcctgtggacttcggcaattcatggaaagtgtcgtctcaatgcgcggatacccgcaaagtgccgttggattcatcaccagctacgtgccacaataacattatgaagcaaactatggttgattcatcgtgtagaattctgacttctgatgtatttcaggattgtaacaaactcgtagatccagaaccttacttagatgtatgcatttacgacacttgctcatgcgagagtatcggagattgtgcatgtttctgtgacacaattgccgcttatgcccatgtatgtgctcaacatggaaaagtagtaacctggagaacagcaactctctgtccacaatcatgcgaggaacgtaatctcagagaaaatggttacgagtgtgagtggcgttacaacagttgtgcaccagcatgccaagtcacgtgtcaacacccggagccattggcatgcccagttcaatgcgtggaaggatgtcacgcacattgccccccgggaaaaatccttgatgaacttctacaaacgtgtgtggatcccgaggattgtcctgtctgtgaggtggctggtagaagattcgcatcgggaaagaaggttactctgaacccgtctgatccagagcattgccaaatttgccactgtgatgtggttaatcttacatgtgaggcatgccaagaaccgggaggattagttgttccgccaactgatgccccagtgtcaccaactactctttatgtagaagacattagtgagccaccccttcatgatttctattgtagtcgattactcgatttggtttttttactggacggttcatcgcgtctatcagaagcggagttcgaagttttgaaagccttcgtagtagatatgatggaaaggttacgtatttctcagaaatgggtgagggtcgcagttgtggagtatcacgatggtagccatgcttacatcggattgaaagacagaaaacgtccctcggaacttcgacgtattgcctcacaagttaagtatgcgggatcacaagtggcgtctacgtcagaagtacttaagtatactctttttcaaattttttctaaaatcgaccgcccagaagcgtctagaattaccttgcttctgatggcatcacaggaaccacagaggatgtctcgaaactttgtacgatatgttcaaggactgaagaaaaaaaaggtaattgtcattccggttggaatcgggccacacgcaaacttaaaacaaattcgcctgattgaaaaacaagcaccggaaaataaggcctttgttctgtcgtctgtggatgaattagagcagcaacgagatgagattgtttcctacttatgcgatcttgctccagaagctcccccgccaacactgccaccagatatggctcaagtgacggttggaccaggcctcttgggtgtttcaactcttggtcctaagcgtaactcaatggttcttgatgtggcattcgtgttagaggggtcagataaaatcggtgaagcagactttaataggtcgaaggagtttatggaagaggtgatacaacggatggacgtcgggcaagattccattcatgtaacagtcctccagtatagctatatggttacagtcgaatatccattttcggaagcacaatccaaaggagatattctccaacgtgtcagagagataagatatcaaggaggaaatcggacgaacactggattggctttgcgatacttatctgatcattcttttctggtgtctcaaggagatcgcgaacaagctcctaacttagtatacatggttacaggaaatccagcttctgatgaaattaaaaggcttccgggagatattcaagtggtaccgataggggttggaccaaatgcaaatgtacaagaacttgagcgtatcggttggccgaatgccccaattctaattcaggatttcgagaccctacccagggaggctccagaccttgttctacaaagatgctgctctggagaaggacttcaaattcctactctcagtccagctccggattgttctcaacctttggatgtcatcttgctattggatgggagctcttcatttccagcatcatattttgacgaaatgaaatcatttgcaaaagcattcattagtaaggctaatattggacctagacttactcaagtgagtgtgctgcagtatggatcgatcacaacaatcgatgtgccatggaatgtcgttccggaaaaggcacatcttctctctctggtagatgtgatgcagcgcgagggcggaccttctcaaattggagatgccttgggcttcgcagtccgatatttgacatcagaaatgcatggggcacgaccaggagcttcaaaagccgttgtgattctggtgactgatgtgagtgttgactccgtagatgctgctgcagatgctgccagaagtaatcgtgtgactgtttttccaattggaattggagacagatacgatgctgctcaactccgtatcctcgcaggacctgcgggggactccaacgtggtcaagttgcagcggattgaggatctaccaacgatggttacgttaggtaactcattccttcacaagttatgctccggatttgttcgtatctgtatggacgaggatggaaacgaaaaacgtccaggagatgtatggactcttccagatcagtgccataccgtaacttgtcagccagatgggcagactctgcttaaatcacatcgagttaattgcgacagaggattgagaccgtcctgcccaaattcgcaatctccagtgaaagtggaggaaacttgcggatgccgttggacatgcccatgcgtgtgtactggaagctcgacacgtcatatcgttacattcgacggacaaaatttcaaattgactggatcgtgctcatatgtgctttttcagaataaagaacaagatctagaagttatattgcacaacggagcttgttccccaggagctcgacagggttgtatgaaatcaattgaagttaaacactcagctctttccgtagaactccattccgatatggaagtgacagttaatggacgactggtgtcagtgccatacgtgggaggaaacatggaggttaacgtatacggagcaattatgcatgaagtaagatttaatcatttaggacacatcttcacgttcacaccacaaaacaacgagttccagctacaattgtctccgaagacgttcgctagtaagacttatggactttgtggaatatgcgatgaaaatggagcaaatgatttcatgttgcgtgacggtactgttaccacagactggaaaacactcgtgcaggaatggacggtacaacgtccaggacaaacatgtcagcctattcttgaagagcagtgtctagtgccagactcgtcacattgtcaagtgcttttgttgcccctttttgctgaatgccataaagtgctggctccggcaacattctatgccatttgccaacaagatagttgtcatcaggaacaggtctgcgaggtgattgcttcttatgcccatttgtgccgaacaaatggtgtatgtgtcgattggcgcactcccgacttttgtgctatgagctgtcccccatctctcgtttataatcattgtgaacacggatgcccgcgtcactgcgatggaaacgtgtcgagttgtggtgatcacccatcggaaggatgtttttgtcctccagataaggtgatgctggaaggatcgtgcgtccctgaagaggcctgtacacaatgcatcggcgaggatggagtccaacaccaatttctagaggcttgggtacctgatcaccaaccatgtcaaatctgcacctgtctttccgggagaaaggtgaattgcacgacccaaccatgtcctactgctaaagcaccaacttgtggtctgtgcgaagttgcgcgtctacgacaaaacgcagaccaatgctgcccagagtatgaatgcgtgtgcgacccagtttcatgcgatctcccgccagtaccccattgtgaaaggggtctacaacccacactgacaaacccaggagaatgcaggcctaacttcacgtgtgcttgccgtaaagaagagtgtaagagagtttccccgcctagttgcccaccccatcgcttaccaactctgcgcaaaacacaatgttgtgatgaatatgaatgtgcgtgcaattgtgtgaattctactgtgtcttgcccattaggttatcttgcttctactgctacaaatgattgtggttgcacaacaaccacctgcttgcccgataaagtttgtgtccataggtcaactatttatccagtaggtcaattctgggaggaaggatgtgacgtctgtacttgcactgacatggaggatgctgttatgggcctccgtgtggctcaatgttctcaaaaaccgtgtgaagattcgtgccgcagtggtttcacgtatgtattgcatgagggagaatgttgtggccgatgtttgccgtcagcctgcgaagtggttacaggatctccacgaggagattctcaaagctcgtggaaatcagttggatcccaatgggcatcgccagaaaatccttgtttaattaatgaatgtgtccgagttaaagaggaggtttttattcagcaaagaaacgtctcctgcccacaattagaagtgcctgtgtgtccatcgggctttcagctctcttgtaaaacttcagcatgctgcccatcatgtagatgtgagcgtatggaagcgtgcatgctcaacggtacagttatcggccctggaaaaacggttatgattgatgtttgcactacatgccgttgtatggtccaagtgggagtgatttcgggatttaagcttgaatgtcgtaaaaccacgtgtaacccatgcccactcggatacaaagaagaaaataacacaggcgaatgctgtggcaggtgcttgccaactgcttgtacgatacaacttagaggcgggcaaattatgaccttgaaacgagacgaaacacttcaagacggttgcgatactcatttctgcaaggtcaatgaaaggggagaatatttttgggagaagcgcgttacgggttgcccgccttttgacgagcataagtgtctagctgaaggaggaaaaatcatgaagatcccaggaacctgttgtgatacatgtgaggagccagaatgcaatgatattacggctagattgcaatacgtgaaagttggttcttgtaaatcagaagtagaggtcgacatccactactgtcaaggaaagtgcgcttccaaagcgatgtacagcattgatatcaatgatgtgcaggatcaatgctcttgctgttccccaacgagaactgaacctatgcaagttgctcttcattgtacaaacggctcagtggtgtatcacgaagtgcttaacgcgatggagtgtaaatgttcaccacgcaagtgctcgaaa

SEQ ID NO: 21393 - DNA, 8439 bp, synthetic construct
  misc_feature 1..8439: note = source = /note="Description of Artificial Sequence: Synthetic coding sequence"
  source 1..8439: mol_type = other DNA
atgattccagcccgattcgccggggtgcttctcgcactggctctaatcctcccgggtacattatgtgcagaggggacgcggggtagaagcagcactgcccggtgttcattgtttggctccgatttcgtgaacacattcgatggctctatgtactcattcgctgggtattgcagctacctgctcgcgggtggatgccagaagagaagcttttccattatcggcgacttccagaacgggaagagagtttctttatccgtgtatctaggagagttcttcgatattcatctgtttgttaatggtacagttacacaaggcgaccagcgagtttcaatgccttacgcatctaagggcctgtacttagagaccgaggctggatactacaaattgtccggagaggcatacgggttcgtcgcgcggatcgacggcagcggaaatttccaagtgctgctgtccgatcggtacttcaataaaacttgtggcctctgtggaaattttaacatcttcgctgaggatgattttatgacgcaggaaggtactctgacctccgatccctacgactttgcaaacagctgggccctaagcagtggagagcagtggtgcgagagggcgagcccaccatctagctcgtgtaatatttcttctggcgagatgcagaagggcttgtgggaacagtgccagctgctgaagagcacatcggtgtttgccaggtgccacccgctagttgacccagaacctttcgtggccctctgtgagaagacactgtgtgagtgtgcggggggcctcgagtgcgcttgtcccgctcttctggaatatgctagaacctgcgcccaagaagggatggtcttgtatgggtggacagaccattccgcatgcagccctgtgtgcccagctggaatggagtaccgccaatgcgtaagcccttgcgcccgcacatgccagtctctgcacataaacgagatgtgtcaagaacgttgcgtcgacggctgctcatgtccagaaggccagctactggacgaggggctctgcgtcgagagtacagaatgcccttgcgtgcactctggcaaaaggtatcctcctggaacctcactgagtcgtgactgtaatacttgcatctgtagaaacagtcagtggatctgctctaacgaagagtgtcctggggagtgccttgtaaccgggcaaagtcacttcaaatctttcgacaaccggtacttcactttctctggaatctgtcagtaccttctcgcacgtgattgccaggaccactccttcagcatcgtaatcgagacagttcagtgcgctgatgaccgtgatgcagtttgcacccgttcagtcaccgtgaggctccccggattgcataacagtctcgtgaaactgaagcacggcgctggggtggccatggacggtcaggatgtgcagctccctcttcttaagggtgatttgaggattcagcacaccgtcaccgccagcgtaaggctgagttacggggaagacctgcagatggactgggacggacgaggccgacttctggtcaaattaagtcccgtgtatgcagggaaaacctgtgggctgtgtggcaattacaacggaaaccagggagacgattttctgacacctagtggacttgcggaaccacgtgtggaggattttggaaatgcttggaaactgcacggcgattgtcaggatttgcagaagcagcactcagacccttgcgctctaaaccctagaatgacccgcttttcggaggaggcctgcgctgtcctcacttctcctacttttgaagcttgccacagggctgtgtccccgttgccgtacctgcgtaattgtcggtacgatgtgtgttcctgcagcgatggcagggagtgcctatgcggagcactggcaagttatgccgcagcttgcgcgggaagaggggtgcgagtggcttggcgcgagcccggccgctgtgagctaaattgtccaaaggggcaggtgtacctgcagtgtggaactccgtgtaacctaacctgtaggtccctgtcttacccggatgaggagtgtaatgaggcctgccttgagggctgcttttgccccccaggcctgtatatggacgagcgcggggattgcgtcccaaaagcgcagtgtccatgttattacgatggggaaatatttcagcccgaggatatcttttctgaccatcatacaatgtgttattgtgaggacggtttcatgcactgtaccatgtcgggggtgcccggaagcctattaccggatgcggttctctcctcacccctgtcccaccggtccaagagaagcctgtcctgtcggcctccaatggtcaagttagtgtgtcccgcagacaacctgagggctgagggattggaatgcactaagacttgccagaattacgatctggagtgtatgtctatggggtgtgtcagcgggtgcttgtgtccacccggaatggtacggcacgaaaatagatgtgtggcgttagagcgctgtccatgtttccatcagggaaaggagtatgccccaggcgaaactgttaagattggctgtaacacttgcgtgtgccaggaccggaaatggaactgtactgaccacgtgtgtgacgcaacgtgtagcacaattggaatggcccactatctgactttcgatggcttgaaatatctgttcccaggtgaatgccagtatgtgttggtccaagattactgcggctccaatcctgggacatttcggatcctcgtcgggaataagggatgttcacatccctcagtcaaatgcaaaaaacgcgtaacgatcctggttgagggaggcgaaatagaactctttgatggcgaggtgaatgtgaagcgaccaatgaaggatgaaacgcattttgaagtggtggaaagcggacgctatatcattctgctccttgggaaagctctgtcagttgtttgggatagacacctcagcatcagcgtggtgctgaagcagacgtaccaagagaaagtgtgcgggctttgtggcaacttcgatggcatccagaataatgatctaacctcgagtaatctgcaggtggaggaggacccagtggacttcggcaactcatggaaagtgtctagtcagtgtgcagacacaaggaaagtgccactggacagctctccggccacctgtcataataacattatgaagcagacaatggtggactcatcctgtcgaattttgacttcagatgtgttccaagactgtaataaacttgtggatcctgaaccatatctggacgtgtgtatatacgacacttgcagttgcgagtcgatcggtgattgtgcctgcttttgtgatacaatcgctgcctacgcccacgtctgtgcccagcacgggaaagtcgttacttggcggactgccaccttgtgtcctcagtcttgcgaagagagaaacctgcgagaaaatggttatgagtgcgaatggcgctacaacagctgcgcccccgcttgccaggtgacatgccagcacccggagcctctggcgtgtcccgttcaatgtgtagaaggatgtcatgcgcactgcccacccggaaagatattggatgaattactccaaacctgcgtggatcccgaagattgccccgtgtgcgaggtagccggcaggaggttcgcgtccggcaaaaaggtaaccctgaacccttctgacccagagcactgtcaaatttgtcactgtgatgtggtgaatttgacctgcgaagcatgtcaggagcctggtgggctcgtggtccccccaaccgacgccccagtgtctccaacaacactatatgttgaggacatctccgaacccccattgcacgacttctactgcagccggctgctggacctggtgttccttttagacggatcttcacgactctccgaagccgaattcgaagtgctcaaagcatttgtcgtagacatgatggagcgtctgcgtatcagtcaaaagtgggtcagagtggccgttgtggagtatcacgatgggagccacgcatacatcggtttgaaggaccggaagaggccctccgaactgcgccggatcgctagccaggtgaaatacgccggcagccaggttgcgtccactagtgaggtccttaagtataccctgtttcaaatttttagcaagattgatcgtcccgaagcctcccgaataacactcctgctgatggcctctcaagagccccagcgcatgagccgaaatttcgtgcgctatgtccaaggcctgaaaaagaagaaggtgatagttattcctgtaggcattggcccgcatgcaaatttgaaacagatcaggttgattgagaagcaggcgcccgaaaataaggcttttgttctgtcgtctgtggatgagcttgagcagcagagagatgagatagtgtcgtacttgtgtgacctcgctcccgaggctcctccacctaccctacctcctgatatggctcaggtgaccgtgggtcccggactgcttggagtctcaactctggggccgaaacgcaactccatggtgttagacgttgccttcgtcttagaaggaagcgataaaatcggcgaggctgattttaacaggtcaaaggagttcatggaggaagtgattcagcggatggacgttggccaggactctattcatgtgacagtactacaatactcctacatggttaccgtggaatatccgttttcagaggcgcagtcaaaaggagacatccttcagcgtgtacgcgaaattcgctaccagggtggtaataggactaacaccggtttagctctaagatacctctctgatcattctttcctggtgtctcagggtgaccgagaacaggcgccaaatcttgtttacatggtcaccgggaaccctgcttcagacgagatcaaaaggttgcctggcgatatacaggtcgtgccaataggagtaggacccaacgccaatgttcaggagctggagcgcattggatggcccaatgccccaatcctgatccaggactttgagacactgcctcgggaggcacccgacctcgtactgcagcggtgttgctcaggcgagggcctccagattccaacactttcccccgccccggattgctctcagcctctggatgttatcctacttctcgacgggagctccagcttccctgcgtcttatttcgacgagatgaaatcattcgccaaagctttcattagcaaggcgaacatcggaccccgactgactcaggtctccgtattacagtacggaagcattactactatcgacgtgccatggaacgtcgtgcctgagaaggcacatctgctgtcacttgtggatgtgatgcaacgcgagggcgggccttcacagatcggcgatgctctcggctttgctgttaggtacttgacctcagaaatgcacggcgcccgaccaggcgcaagtaaagccgtggttatcttggtcacagacgtttctgtggacagcgttgatgctgcagcggatgctgctcggtctaacagggtgaccgtgtttccaattggcatcggtgaccggtacgatgccgctcagctgcggatactagcagggcccgctggggacagcaacgtggtgaagctccagcgtatagaagatttgccaacaatggttactctgggaaactccttccttcacaaactgtgtagcggctttgtcaggatttgtatggatgaagatggcaatgagaagcgtcccggcgacgtgtggacactgcctgaccagtgtcatactgttacgtgccagccagacggccagactttattgaagtcccaccgggtgaattgcgaccggggtctgaggccctcctgccccaactcccagtcacccgtcaaggtggaagaaacgtgtggatgtcgatggacttgcccctgtgtatgtaccggctcctcgaccaggcacattgttacatttgacgggcaaaactttaaactgactggaagctgctcctatgttctcttccagaataaagaacaggacctcgaggttattctgcacaacggggcctgttctcccggagcaaggcagggctgtatgaaatctatcgaggtcaagcattctgccctaagtgtagaactgcactcagacatggaagtgacggtgaacgggcggcttgttagtgttccctatgtaggtggcaatatggaagtcaatgtctatggggccataatgcatgaagtcagatttaaccaccttggtcacatatttacttttacgccccagaataacgagtttcagcttcagttgagcccaaaaacctttgcgagcaagacctacgggctgtgcgggatctgtgacgagaacggagctaatgatttcatgctgcgcgacgggacggttacaaccgattggaaaacactggtgcaggaatggaccgtgcagaggcccggacagacgtgccagcctatactggaggagcagtgtctcgtccccgacagcagccattgccaagttctcctcctacccctgtttgccgaatgtcataaggtcctggctccagccacgttttatgcaatctgtcagcaagattcctgtcatcaggagcaggtctgcgaagtgatcgcatcttatgcccatttgtgccggactaatggcgtttgtgtggactggcgcactcccgacttctgtgccatgagctgccctccatcattggtgtataaccactgtgagcatggttgtcctcgacactgtgacggcaatgtcagcagctgcggcgatcacccctctgaaggttgcttttgcccaccagataaggtgatgctggaaggaagttgcgtgccagaggaggcctgtacccaatgcataggggaagacggggtgcagcatcagtttttggaggcttgggtccccgatcatcagccttgtcagatttgcacgtgtctgtctggccggaaggtcaattgcacaacccaaccttgtcctaccgccaaggccccgacatgcggcctttgcgaagtggcacgcttgcgccagaatgccgaccagtgttgcccagagtacgaatgtgtgtgcgaccctgtttcctgcgacctccctccggtaccccattgcgaacggggactgcagcccactttaactaacccaggagaatgccggcccaactttacatgcgcctgtaggaaagaggaatgtaagcgcgtctcccctcccagctgtccaccacacaggctgcccaccctgcgaaagacccagtgttgtgacgaatacgagtgcgcttgtaactgcgtgaacagtacagtgtcatgccccctgggatatcttgcctctaccgccactaatgattgtggatgtactactacgacatgcctgcccgacaaggtctgcgttcataggagcaccatctatcccgtcggccagttttgggaagagggatgcgacgtttgcacctgtacagacatggaggacgctgtgatgggtctcagggtggcgcaatgtagtcaaaagccctgtgaagatagttgcaggagtggctttacatacgtgcttcacgaaggcgagtgctgtggcaggtgtttgccgtctgcctgcgaagtcgtcacaggctcaccccggggagacagccagtctagctggaaatctgtcggaagtcagtgggcctcacccgagaatccatgcctcatcaatgagtgcgtaagagtcaaggaggaagtgttcattcagcagaggaatgtgtcatgccctcagttagaggtgcctgtttgcccttccgggttccagctatcctgcaagacatctgcgtgttgtccgtcctgtcgctgcgagcggatggaagcttgtatgcttaatgggaccgtgattggtcccggaaagacagttatgattgacgtgtgcacgacatgccgctgtatggtgcaagtaggggtgattagcggattcaaattagagtgtcggaagaccacatgtaacccttgcccactcggatacaaggaagaaaacaacaccggggagtgctgcggacggtgtctgccaaccgcgtgtaccatacaactccggggcgggcaaattatgaccctgaagcgcgatgagaccttgcaggatggttgcgacacccacttttgtaaggtgaacgaaaggggtgagtacttttgggagaaaagggtgacaggatgtcctccatttgacgaacacaagtgtctagccgaggggggcaaaatcatgaaaatacccggtacctgctgcgacacttgcgaggaaccagaatgcaacgatataacagccaggttgcaatacgtgaaggtaggatcctgtaagtctgaggtggaggtcgacatccattattgtcagggtaagtgtgcctccaaagcaatgtattctatagatattaacgatgtgcaagatcagtgttcctgttgctcaccaaccaggacagaacctatgcaggtggccctgcattgcacaaacggaagcgtcgtgtatcacgaggttctcaacgctatggagtgcaagtgttctcctcgcaagtgttccaag

SEQ ID NO: 21394 - DNA, 8439 bp, synthetic construct
  misc_feature 1..8439: note = source = /note="Description of Artificial Sequence: Synthetic coding sequence"
  source 1..8439: mol_type = other DNA
atgattcctgcaaggtttgcaggagtgctcctggcgcttgccctcattctcccaggcacattatgtgcagaaggtacacgcggacgttcttcaacagcacgctgttctcttttcggatcagattttgtgaatactttcgacggcagcatgtatagtttcgctgggtactgctcttacctgctggctgggggttgtcagaaaagatccttctccatcataggggacttccaaaatggtaagagggtttccctatctgtgtacctcggagagttcttcgatatccatctctttgttaacggaaccgtgacccaaggcgaccagcgtgtatccatgccctacgccagcaagggtctataccttgaaaccgaggcagggtactataaactgagcggggaggcgtacggcttcgttgccaggatcgatggttctggcaatttccaggtgctcctgtctgaccgctacttcaataagacgtgcggtctctgtgggaattttaatattttcgctgaggacgattttatgactcaggagggtacattgacctctgatccctacgactttgcgaactcctgggctttatcttctggagaacagtggtgtgagagagcatcgcccccatctagctcatgtaacatcagctcaggggagatgcagaaaggattgtgggagcagtgccagcttctgaagtcaacctcagtgttcgccagatgtcaccccctggtcgacccagagccttttgtggccctgtgtgaaaagacactgtgtgaatgcgctggcggactcgagtgtgcctgtcccgcgctgctcgagtacgcacgaacctgtgctcaggaaggaatggtcctatatgggtggacagatcattccgcttgttctcccgtgtgtccagctgggatggaataccggcagtgtgtaagcccgtgtgccaggacatgtcagagtctccacatcaacgaaatgtgccaggagcggtgcgttgatggatgtagctgtccggagggtcagctgctggacgaaggtctgtgtgtcgaatccacggagtgcccgtgtgtgcattccgggaagcgatatcctcccggtacgtcactgtcccgggattgtaacacctgcatatgccgcaattcccagtggatttgtagcaacgaagaatgtccaggagagtgtttggtcacaggtcagagccatttcaaaagcttcgataaccgatacttcaccttttccggaatatgccagtacctccttgcgagggactgccaagaccatagtttttccattgtgatcgaaaccgttcagtgcgccgacgaccgggacgccgtttgcacacggtccgttactgtcaggctgcctgggctgcacaacagtctagtcaagctcaagcacggcgccggggtggccatggacggtcaagatgtgcagctgccactcctcaagggtgacctccgaatccaacatacggtgactgcttccgtacggctgagctacggtgaagacctgcagatggactgggatgggcgcggacgcctgctggtcaaactgtccccagtgtacgccgggaagacttgcggcctttgcgggaactataacggcaatcagggggatgattttctgactccaagtggtctggcggaaccacgggtggaagactttggaaacgcgtggaaattgcacggcgattgccaggatctacaaaaacagcacagtgacccttgcgccttgaatccccgcatgactcggtttagtgaggaagcatgtgcagttctgaccagtccaactttcgaggcctgccacagagcggtgtctcctttgccctacctcagaaattgccggtatgacgtctgcagttgctcggatggaagagagtgcctgtgcggcgcgcttgcaagttacgcagctgcttgtgctggaagaggtgtgagagtggcctggcgagaacccgggaggtgtgaattaaactgtcctaaaggacaggtgtacctccagtgtggtactccttgcaacctgacttgtcgctccctcagttacccggacgaggagtgcaacgaggcctgcttggagggttgcttttgcccacccggactgtacatggacgagcgcggagactgcgtgcccaaggcgcagtgtccctgctactacgacggggagatctttcagcccgaagacattttcagtgaccatcatacgatgtgttactgcgaagatggctttatgcattgcactatgagtggagttccggggagtctgttaccggatgctgtgttgtcatctccattgtcccaccgctcaaagcggtctctcagttgcagacctcccatggtgaagctggtctgtcctgctgataaccttcgcgcggagggtcttgagtgcaccaaaacttgccagaattatgatcttgagtgcatgagcatgggatgtgtgtctgggtgtttgtgcccgccgggcatggtacggcacgaaaaccgctgcgtcgcattggaaaggtgcccatgcttccatcaggggaaggagtatgcacctggggaaacggttaaaatcggctgcaacacctgcgtgtgtcaggacaggaaatggaactgcaccgatcacgtttgtgatgctacgtgttcaaccatcggcatggcccactatcttacctttgacgggctgaaatatctcttccccggagagtgtcagtacgtcctggtccaggactactgtggaagtaacccaggcacgtttcggattctagtgggcaataaaggctgctcacacccctcagtgaaatgcaagaagcgtgtgaccattctggtggagggaggagaaatcgagttgtttgatggggaggttaatgttaagcggcctatgaaggatgagacacatttcgaagtggtggagtccggacgctacattatcctgcttctgggtaaagcccttagcgtcgtgtgggaccggcacctatctatatcggtggtgcttaagcagacgtatcaggagaaggtgtgcggtctttgcggaaactttgatggtatacaaaacaacgacttaacgtccagcaacttgcaggtcgaggaagatcctgtcgacttcggaaattcttggaaagtgagctctcagtgtgcagacacaaggaaagtacccctggactcttcacctgctacctgtcataataatataatgaaacagacgatggtcgattcctcctgcaggatactcactagtgacgtctttcaagactgcaacaaactcgtcgaccctgaaccctacctggatgtgtgtatctatgatacatgctcctgtgaaagtattggcgactgcgcttgcttttgtgatacaatagctgcgtacgcgcacgtgtgtgctcagcacggaaaggtcgttacctggcgtaccgcaacactgtgtcctcagtcatgtgaagaaagaaaccttcgcgagaatggctatgagtgtgaatggagatataattcttgtgcccccgcatgccaggtgacttgccagcatccagagccgctggcttgtcccgtgcagtgcgtggaggggtgtcacgcacattgcccgcctgggaaaatcctcgacgagctactccagacatgcgttgatccagaagattgtcccgtttgcgaggtggctgggagacgattcgcatcaggaaagaaggtgacgctcaatccttcagatcctgagcactgccagatctgtcactgtgacgtagtaaatctgacatgtgaagcatgtcaggagccgggtggcctcgtggttcccccaactgacgcccccgtgagtcctaccaccctgtacgttgaggatatatcggagcccccactacacgatttctactgcagccgcctgctggacctcgtttttttgctggacggaagctcccgcctcagtgaagcagaattcgaagtgctcaaagcctttgtggttgacatgatggaaagactgagaatttcccagaagtgggtccgggtggctgttgtcgaataccacgatgggagccacgcatacatcggcctcaaagataggaagaggccgagtgagctgcgacgaatagcctctcaagtgaaatatgcaggcagtcaggtggcttctacatcagaggtgctaaagtacaccttatttcagatcttctctaaaatcgacaggcctgaagcttcccgcattaccttactattgatggcatcacaggagccccagagaatgtccaggaacttcgttagatacgttcaggggctcaaaaaaaagaaggtaatcgtcatccctgtgggcatcgggccacacgctaacctgaaacagatccgccttatcgagaaacaggcgcctgagaataaggcttttgtgctctcatctgtggatgagttagaacagcagagggatgaaatcgtatcttatctgtgcgatttggcacctgaagcaccccctcccacactgccgcccgatatggcacaagtgaccgttggacccggactgctcggagtttccactctgggcccgaaaagaaactcgatggttttagacgtagcatttgtgctcgagggctcagacaaaattggtgaggccgacttcaacaggtctaaggagttcatggaggaagttatccagcgaatggatgtcggacaggattctatccatgtaactgtactgcaatacagctacatggtaaccgtggaatatccattctcagaggcccagagcaaaggcgacattcttcagagggtgcgagagatccgataccaaggcgggaatagaaccaataccggcctcgctcttcggtatcttagcgaccatagcttcctcgtcagtcaaggcgaccgggaacaggctccaaacttagtttatatggtgacaggaaatccagccagcgacgagattaagagactcccgggggacatccaggtggtgcctatcggcgtgggacccaacgcgaacgtccaggagctggagcggataggatggcccaacgcccctatcctgatccaggatttcgaaaccttaccgagagaagcccctgacctggtgctgcaacgctgctgctcgggagagggcttacaaattccaacccttagccctgcccctgattgcagccagcctttggatgttatactgctcctggatggaagtagcagtttcccagcttcttacttcgatgagatgaagtcatttgctaaggctttcatttcaaaggctaacataggtccacggctcactcaagtctcggtgttgcagtacggatctatcaccacaattgatgtgccttggaatgtggtgcccgagaaagctcacctgttgtctctggtagacgtgatgcagcgcgagggggggccaagtcagatcggggatgcgctggggtttgcagtccggtacctgactagcgagatgcacggggcacgacccggcgcgagcaaagccgtggtcatactcgtgaccgatgtgtctgttgactctgtcgacgcggctgcagatgcagctcgaagcaatagggtgacagtgtttcctatcggaattggtgatcggtacgatgcagcgcagctgagaattttggccggccccgccggcgacagcaatgtagtcaaactccaacggatcgaggatctgcccaccatggtgactctgggtaactcatttttacacaagctttgctcaggctttgtcaggatatgcatggacgaggacggaaacgagaagagacctggagacgtatggacactgccggaccagtgtcatacagtgacgtgtcaaccggatgggcagactctgctgaagagtcacagagttaactgcgacagggggctccgacccagttgtccgaatagtcagtctcccgtgaaagtcgaggaaacatgtggctgtagatggacctgtccttgtgtctgtaccgggagttccacccggcatatcgtgacctttgacggccagaatttcaagctaactggatcgtgcagctatgtgctgttccagaacaaggaacaagacttggaggtgatcctacataatggggcttgcagccccggtgccaggcagggatgtatgaagagcatcgaggtgaaacacagtgccttgagtgtagaattgcatagcgacatggaagtgactgtaaacggtaggctggtgtctgtgccatacgtcggaggcaacatggaggtaaatgtgtacggcgctatcatgcacgaggtccgatttaatcatctcgggcacatctttacgttcaccccacaaaacaacgagtttcagctacagctgagtccaaagacctttgcgtctaaaacttacggcctatgcggcatttgcgacgagaacggagccaatgactttatgctgcgcgacggtacagttacaactgactggaaaacattagtccaggaatggactgttcaacgccctggccagacctgccagcctattctcgaggaacagtgtttggtaccggacagcagccactgtcaggtgctgctcctgcctctctttgctgagtgccacaaggtcctggcccctgcaaccttttatgctatttgtcagcaagacagctgtcatcaggaacaggtctgtgaggttatcgcgtcgtatgcccacctgtgtcggaccaacggagtgtgtgtggactggagaactccagatttttgcgcaatgtcatgtccaccatcactggtatataaccattgcgaacacggctgtcccaggcactgcgatgggaacgtaagctcctgtggtgatcatccgagtgaaggatgcttctgcccaccggacaaagtcatgctagagggttcgtgcgtcccggaagaggcttgcacacagtgcattggagaggatggagtacagcatcaatttttggaggcctgggtgcccgaccaccaaccatgtcaaatttgcacttgcctgagcggaaggaaagtgaactgcactacccagccatgtcctactgccaaggcacccacttgtgggttatgtgaagtggctaggctgcgacagaatgccgaccagtgttgcccagaatatgagtgcgtttgcgacccagttagctgcgacctgccaccagtgccccattgcgagcgcggcctccagcctactctgaccaaccctggggagtgcagacccaacttcacatgcgcttgcaggaaagaggagtgtaaacgcgtatcccccccctcttgtccaccccatagactcccaaccctgcggaaaacccagtgctgcgacgagtatgagtgcgcctgcaactgtgtgaatagcaccgtgtcctgtcccctgggatatcttgcatcaacagcgactaatgactgcggctgcaccaccacaacctgtctaccggataaggtttgcgtgcatagatctacaatctatcctgtgggacaattctgggaggaagggtgtgatgtctgtacgtgcacggatatggaggacgcagtgatggggctgagagtggctcagtgctcacaaaaaccatgcgaggactcatgtcggtccggtttcacctatgtgctgcatgaaggcgaatgttgtggaaggtgtctgccatccgcatgcgaagtggtgacaggctccccgcgcggagatagccaatcttcctggaaatctgtgggatcacagtgggcttctcctgaaaacccctgcctcattaacgagtgtgtacgagtgaaggaggaagtgtttatacagcaacggaatgtcagctgcccccagctagaggtgcccgtgtgtccgtcagggttccagttaagttgtaagacatctgcttgctgtccctcatgtaggtgtgagaggatggaggcttgtatgctgaacggtactgtcattggccctggcaaaactgttatgattgatgtgtgtacgacctgcagatgtatggtgcaggttggagtgattagcggcttcaaacttgagtgtcggaagactacatgtaacccctgcccccttggttacaaggaggaaaacaacaccggtgaatgttgtgggaggtgtctgcccacggcatgcaccattcagcttcggggtgggcagattatgaccctgaagcgggacgaaacactgcaggacggctgcgatacgcacttctgcaaagtcaatgaacgaggtgagtatttctgggagaagagagtaaccggttgccccccttttgatgagcacaagtgtctggctgagggcggcaagatcatgaagatacccggtacttgttgtgatacttgtgaggagcctgagtgtaacgacatcacggccaggctgcagtacgtcaaagtggggtcttgtaagtctgaagtggaagtcgatattcattactgccagggcaaatgtgccagcaaggcgatgtacagtatcgatattaacgacgtccaggaccagtgcagctgctgttctccaactcgaaccgaacctatgcaggtcgcattacactgcactaatgggtctgtggtataccacgaggtgctgaacgcaatggagtgtaagtgttcaccaagaaagtgttctaaa

SEQ ID NO: 21395 - DNA, 8439 bp, synthetic construct
  misc_feature 1..8439: note = source = /note="Description of Artificial Sequence: Synthetic coding sequence"
  source 1..8439: mol_type = other DNA
atgattccggcaagattcgcgggcgttctcctggctctggcgctgattctgcctggcacactgtgtgcggaaggtacaagaggccgcagttctaccgcccgttgctcgttatttggcagcgactttgtgaatacgtttgatggatcaatgtactcattcgccggttattgctcttacctcttggcagggggctgccagaagcgttctttttccatcatcggcgactttcagaacggaaaaagagtcagccttagcgtttacttgggggagttttttgacatccatttgtttgtaaatggaacggtaacgcaaggcgaccaaagggtgagcatgccttacgcgagcaaaggcctttacctcgaaacagaagctggctattataaacttagtggcgaagcatatggatttgtggcgcgtatcgacgggtcaggaaatttccaagtgttactgtcggatcggtactttaataaaacatgcggtctttgcgggaattttaacattttcgcggaagacgattttatgacgcaggagggtacactgacgtcggatccttatgattttgcaaatagctgggccctgagttccggagaacagtggtgtgaacgcgcgagccctccgtcgagctcgtgcaacattagctcgggcgagatgcagaaaggactttgggagcagtgtcagcttttaaaatcaacaagcgtcttcgcccgttgccatccgctggttgatccagaaccctttgtcgcactttgtgagaaaacgctttgcgagtgcgcaggcggtttggaatgtgcatgcccggcgttgctggagtatgcaagaacatgcgcacaggaaggaatggtactttacggatggacggatcactcagcatgttcacctgtctgtcctgctggtatggagtaccgacagtgtgtaagcccttgcgctagaacatgccaatcactgcatattaatgaaatgtgccaggaaaggtgcgttgacggctgctcttgccctgaaggccaactgcttgatgaaggtttatgtgtagaatcaacagaatgtccatgtgttcattctggaaaacgttatccacctggcacctcactcagtcgtgattgcaatacatgtatctgtagaaactctcagtggatttgctcaaacgaagaatgccctggcgaatgtcttgtcacgggccagtcacattttaaatcctttgacaaccggtatttcacatttagtggcatttgccagtatttactggccagggactgtcaggaccattcatttagtatcgtgattgagaccgtgcaatgtgctgatgatagagatgccgtttgcacgagatccgtaaccgttcgtttgccgggcttacataacagtttggtgaaattgaaacatggagctggggtcgcaatggacggccaggatgtgcaacttcccttgttgaagggcgatctccgcatacagcacactgtaacagcatctgtgagactttcatacggcgaggacttacagatggattgggacggccgggggcgtttgctggtcaaactgtccccggtttatgcgggtaaaacttgcgggctctgcggcaattataatggtaaccagggagatgattttctgacgccgagcggcctggccgaaccacgggtggaggacttcggcaacgcgtggaaattacacggtgattgccaggatctgcagaagcaacatagcgatccgtgcgctctgaatccaaggatgacaagattcagcgaagaagcctgcgctgtgttgacaagcccgacttttgaggcgtgtcatcgggcagtgtccccgcttccctatttgcgcaattgccgctatgatgtttgttcatgctctgatggtagggagtgtctttgtggtgctcttgcgtcatatgcggcagcttgtgcgggtagaggcgttcgggtagcatggagagaaccgggaagatgtgaattaaattgcccaaaaggccaagtttacctgcaatgcggcacgccgtgcaatctcacctgtcgcagcctgtcctatccggacgaagaatgcaacgaagcgtgcctggaaggatgtttttgtccaccggggctgtacatggatgaacgtggcgactgcgttccgaaagctcaatgcccttgttattatgatggcgaaatatttcaaccggaggacattttctcagaccatcatacaatgtgttattgtgaagatggattcatgcattgtaccatgagcggcgttccgggatctttattgcctgatgctgttctttctagccccttaagtcatcgctccaagaggagcttgagctgtaggccgccaatggttaaacttgtctgccccgccgataatctgcgggcggaggggttagagtgtaccaaaacttgccaaaattacgacttagaatgcatgtcaatgggatgtgttagcggttgcttgtgcccgccggggatggtacgccacgaaaacagatgtgtagctttagaacgttgtccgtgttttcaccaggggaaggagtacgcaccgggagagacggtgaaaattggttgtaatacatgcgtatgccaagatagaaaatggaattgtacagatcatgtatgtgatgccacgtgttcaacaattggcatggcacattacctgacttttgatggattaaagtacctattccctggcgaatgtcagtacgtactggtccaggattattgcggctctaaccctggaacctttagaatcctcgtcggaaataaagggtgttcgcacccgtcagtgaaatgtaagaaaagagtcacaatcctggttgaggggggcgaaattgaactgttcgatggggaggttaatgttaaaagaccaatgaaagacgagacacatttcgaagtggtagaaagtgggcgctacatcatattgttgctcggcaaagctttaagcgttgtatgggaccgccacctcagcatttcagtcgtacttaaacagacatatcaagaaaaagtctgtggtttgtgtggcaacttcgatggcattcagaacaacgatttaacaagctctaatctgcaagttgaggaagaccctgtagattttggaaattcatggaaagtgtcttctcaatgtgctgatactcgcaaggtcccattggattcatcaccggcaacatgtcacaacaatataatgaaacagacaatggtagattcttcttgcagaatcttgactagcgacgtgtttcaagattgcaacaaacttgtcgatcccgagccgtatcttgacgtatgtatttatgacacatgcagttgcgagtcaattggcgattgtgcttgcttttgcgatacaattgctgcgtatgcacatgtatgtgctcaacacggtaaagtcgtaacctggagaacagcaacgttatgcccgcagagctgtgaagagcgcaacctacgagaaaacggatatgaatgcgaatggcgctacaactcttgcgcacctgcgtgtcaggttacatgtcaacacccggaacctctggcgtgcccggtgcagtgtgtcgaaggatgccatgcacattgcccccctggcaagatcttagatgaactgctccaaacatgcgttgatccggaagattgtccagtttgtgaagttgccggacgtcgattcgctagcggcaagaaagtaactctgaatccgtcagatcctgaacattgccagatctgccattgcgatgtggtcaacttgacttgcgaggcttgtcaggaaccgggcggtcttgtggtaccgccgacagatgcgccggtctcccccacgacattatatgtggaagatatctctgaaccgccgttacatgatttctactgttctagacttctagatctggtatttctgcttgatggcagttctcgtcttagcgaagcagagttcgaagttctgaaagctttcgtcgtcgacatgatggaacgcctgagaatttcacagaaatgggtccgagtagccgttgttgaatatcatgacggctctcatgcgtatatcggcttgaaggaccgaaagcgaccgtccgagcttagaagaattgccagccaggtaaaatatgcagggtcacaggtggcctcaacgtccgaagttctgaaatatacgctttttcaaattttttccaaaattgataggcctgaagccagtcgcatcacgctcctattgatggccagccaggagccacagagaatgagtaggaacttcgttcgttacgtacagggacttaagaaaaaaaaagtgatagtaattccggtaggcattgggccgcatgccaaccttaaacagatacgtctaattgaaaagcaagcacccgaaaataaggcctttgtattatctagtgtagatgagcttgagcagcagcgcgatgaaatcgtatcttatctttgtgaccttgccccggaagcccctccgcctacgttgccacccgatatggcccaggtgaccgtggggccggggcttctgggcgtgtctactctaggcccaaaacgcaacagcatggttctcgacgtagctttcgtcttagaagggagtgataaaatcggagaagcagattttaacagatctaaagagtttatggaagaagtgattcaacgaatggatgtagggcaggattcgattcatgtcactgtgctgcagtattcatatatggttacagttgagtacccgtttagcgaagctcaaagcaaaggagacatccttcagcgcgttcgtgaaatcagatatcaggggggtaatcggacgaacaccggcctagctttacggtatctttctgatcactcttttctggtaagccaaggagatcgtgaacaggcgccgaacctggtgtatatggtgacaggtaaccctgcgtcagacgaaattaaacgccttcctggagatattcaggtcgtaccgattggcgtcggacctaacgcaaatgtgcaagaattggaacgtatcggatggccgaatgcaccgattctcatccaagatttcgagacgttgccgcgcgaagcacctgatttggttctgcagagatgctgcagcggcgagggccttcagattccgaccctttctccggcgccggactgtagtcaaccgctcgatgtaatcctccttctggatggaagcagctcgttcccggcatcttatttcgacgaaatgaaatctttcgcaaaagcatttatttctaaggcaaatatcggcccgcgcctgactcaggtttcagtattgcaatacggctcaattacgacaattgatgtcccgtggaatgtggtacccgagaaggcccatttgctttctcttgtagatgtgatgcaacgagaaggaggtcccagtcaaattggcgacgccttgggcttcgcagttcgctatttgacctccgagatgcatggagcaagaccaggagcaagtaaagccgtggtcattcttgttacagatgtgtccgttgatagcgtcgatgccgccgcagatgcggcaagaagcaatagagtcacagtctttccgattggtattggtgatcgctatgatgcggcacagcttcgtattttagccggccctgcgggggattcaaacgtcgtcaagctgcagcgtatcgaggatctcccaacaatggtaacacttggcaatagcttccttcataaactgtgcagcggttttgtaagaatctgcatggatgaagatggtaatgaaaaacggccaggggatgtatggacgcttccggatcagtgccatacagtgacgtgtcagccggatggacagactctccttaaatctcatcgggtcaactgcgatcggggccttcgcccctcatgccctaatagccaaagcccggtcaaagttgaagaaacatgcgggtgtcgatggacatgtccgtgcgtgtgcaccgggtcttccacacgccatattgttacatttgacggccagaattttaaattgacaggctcttgcagctatgtgctcttccaaaacaaagaacaggatctggaagtgatactgcacaacggtgcgtgcagtcctggggctcgccaaggttgcatgaaatcgatagaagtgaaacatagcgcgttgagcgtcgaacttcattctgatatggaagtaacagttaatgggcgtcttgtttccgttccatatgtcgggggtaatatggaagtgaatgtctatggcgcgataatgcacgaagtccgcttcaatcatctaggacatatcttcacattcacgccgcagaataatgaatttcaactgcagctgagccctaaaacctttgcatccaagacgtatggcctgtgtggaatttgtgacgaaaatggggccaatgatttcatgttaagagatggcacagtcacgacggattggaaaaccttggtacaggaatggacagtgcagcggccaggccagacctgccaacctatcctggaagagcagtgtttagttccggattcttcacattgccaagttctccttctgccgttatttgccgaatgccataaggtgctggcccctgccacgttctacgctatttgccagcaagattcgtgtcaccaagaacaggtctgcgaggtgattgcctcttatgcacacttatgccggacgaatggagtttgtgtcgattggcgtacccctgacttttgtgcgatgtcatgcccgccttccctagtctataaccattgcgaacatggctgtcccaggcattgcgatgggaatgtgtcaagttgtggcgaccatccgtcggagggttgcttttgtcctccggacaaagtcatgttagagggctcttgcgtgccagaagaggcttgtacacaatgtattggcgaagatggagtgcagcaccaattcctcgaagcctgggtgccagatcatcagccttgccaaatttgtacgtgcttatcaggccgtaaagtgaattgtacgacacaaccgtgtcctaccgcaaaggcgcccacctgcggcttatgcgaagtcgctcgattgcggcagaatgccgaccaatgctgcccggagtatgaatgtgtctgcgatcccgtcagctgtgatcttccgccggttccacattgtgagcgagggcttcaaccgacattaaccaatccgggcgaatgtagaccgaactttacatgtgcctgtagaaaggaagagtgcaaaagggtatccccaccgagctgtcccccacataggctaccgacgttaagaaaaacccagtgttgtgatgagtatgagtgtgcttgcaattgcgtgaatagcactgtcagctgtccgcttggttatcttgcttcaactgctacgaacgattgcggttgcacaacaacgacttgtctccctgacaaggtttgcgtccatcgcagtactatctatcccgttggtcaattttgggaagaagggtgtgatgtctgtacatgtactgacatggaggacgctgtcatggggttgagagtcgctcagtgctcccagaagccttgtgaagattcgtgcagatccggatttacttatgtgctccacgagggcgaatgctgcggacggtgtttacctagtgcatgtgaggtggtgacaggctcaccgaggggtgacagccagagttcttggaaatctgttggttcccaatgggcttcaccggagaacccatgtcttataaacgaatgcgtacgcgtgaaggaggaggtcttcattcaacaacgcaatgtcagctgtccgcagcttgaagtgccggtatgccctagcggttttcaactgtcctgtaagacctccgcttgctgtccaagttgtagatgcgaaagaatggaggcttgcatgctgaatggcacagtaattggccctggcaaaacggttatgatcgatgtctgcacgacgtgcagatgcatggtgcaggtgggcgtaattagtggatttaagctggaatgtagaaaaacaacatgtaacccgtgcccgttaggttacaaggaagaaaataacaccggtgagtgctgtggacgttgccttcctacagcatgcaccatccaactgagaggcggacagatcatgaccttgaaaagagatgagacactgcaagatggatgtgacacacatttctgtaaagtcaacgaacgtggagaatacttttgggaaaaaagagttaccggttgtcccccctttgatgaacataaatgtcttgcggagggaggtaaaatcatgaagatcccaggcacatgttgtgacacatgtgaagagcctgagtgtaacgatatcacagcccggctgcaatacgttaaagtcggatcttgcaaaagcgaggtcgaagtcgacattcattattgtcaagggaaatgcgcatcaaaagctatgtattcgatcgacattaacgacgttcaggatcaatgttcttgttgcagcccgacccgtacagagccgatgcaggtagcattgcattgtaccaacggttcagttgtttaccatgaagtcctaaatgccatggaatgtaaatgtagcccacgtaaatgctcaaaa

SEQ ID NO: 21396 - DNA, 8439 bp, synthetic construct
  misc_feature 1..8439: note = source = /note="Description of Artificial Sequence: Synthetic coding sequence"
  source 1..8439: mol_type = other DNA
atgatccccgctagatttgccggggtactgctggcccttgccttgatccttcctggcaccctctgtgctgagggcacccgaggacgcagttctaccgctaggtgttccttatttggttctgattttgtaaacacatttgacggcagcatgtatagtttcgctggatattgctcatacctgctcgcgggtggatgccagaaacgatcattctctatcattggggacttccaaaacggaaaaagggtgagtttatcagtctacttgggcgaatttttcgatatccacctgtttgtgaacggaactgtaacccagggagaccagagggtgtctatgccttatgcttctaagggactgtacctagaaacggaggctggctactacaaactatcaggggaagcctatggctttgtcgcacggatcgacggctctgggaacttccaggtgctgctgtccgaccgttacttcaacaagacctgcggcctctgcggaaactttaacatattcgccgaggacgacttcatgactcaggaaggcacactgacaagtgacccttacgatttcgcgaactcgtgggcactctcctccggagaacagtggtgtgaaagggcttccccgccctcctccagctgtaacatctcaagcggtgagatgcagaagggactgtgggaacagtgccagctgctgaagtctacctccgtgtttgccaggtgtcatcccttagtggacccggaaccctttgtggcactatgtgagaagacgttgtgtgagtgtgcaggtggcctggaatgtgcatgtccggccctgcttgaatatgcacgaacatgcgcgcaggaggggatggttctgtacggctggaccgatcatagtgcttgcagcccagtatgccctgcaggcatggaatacagacagtgcgtctcaccctgcgcacgaacttgccaatccctgcacatcaatgaaatgtgccaagagagatgtgtcgatgggtgcagctgcccagagggccagctgctagatgaggggttgtgtgtggaatctacagaatgcccttgtgtgcactcaggaaagagatacccccccggtacatctctgagcagggactgcaatacttgcatctgtagaaactctcagtggatatgctcaaatgaggaatgtccgggagaatgcctggtgacagggcagtcccacttcaaaagcttcgataaccggtacttcacctttagtgggatttgccagtacctccttgcacgtgactgtcaagaccactctttttctatagtcattgagaccgtacagtgtgccgacgatcgtgacgcagtttgcacacgatcggtgactgtgagacttccaggcctgcacaatagcttggtgaagctgaagcacggcgctggagttgccatggatgggcaagatgtgcagctccctttactgaagggggacctccgtatacagcacacagtgaccgctagtgtgagactcagctacggcgaagatctgcagatggattgggacgggcgcgggcggctgctcgtcaagcttagcccagtctacgcaggcaagacatgcggcttatgcggaaactacaatggaaaccagggtgacgactttctgacaccctccggcctggccgaaccacgagtcgaggatttcggcaatgcctggaaactgcacggggactgccaagatctgcagaaacagcattccgacccatgcgccctgaatccaaggatgactcgcttcagcgaggaggcctgcgcagttctaacctctccaacattcgaggcatgtcatcgcgccgtgtccccgctcccatacctgcgtaattgcagatacgacgtgtgttcatgtagcgacggcagagaatgcctgtgcggcgcactggcttcttatgcagccgcttgcgcaggccggggggttcgggtggcttggagggagcccggccgatgcgagctaaactgtcctaaggggcaggtctacctacaatgcggtaccccttgtaacctgacctgtcgatctctgagctaccctgatgaggaatgcaatgaggcttgtctcgaaggatgcttctgcccccccggcctgtatatggatgagcgcggggattgtgtgcccaaggctcaatgtccctgctactacgatggtgagatctttcagccagaagatatcttcagtgatcatcacactatgtgctactgcgaggatggtttcatgcattgcactatgagtggtgtgccagggagtttgctccccgatgcggtgctctcgagcccactctcccatcgaagcaaacgttcactctcgtgcaggccacctatggtgaaactagtgtgccctgctgataatctgagagccgaaggattagaatgtacgaaaacatgccaaaactatgacctggaatgtatgagcatgggatgtgtaagcggctgtctttgtcccccggggatggttcgacacgaaaacagatgtgtagccctcgaacgatgtccttgcttccatcagggcaaggagtatgctcccggtgagaccgtaaaaattggatgcaatacgtgcgtgtgtcaggatagaaagtggaactgtaccgatcacgtttgcgatgcaacctgcagcacaatcgggatggcccactatctaacctttgatggccttaagtatttatttccaggagaatgccagtatgtcctcgttcaggactactgcggctcaaatcctggaacttttcgtatactggttggaaacaaaggctgttcccacccatctgtgaagtgtaagaaacgggttacaattttggtggaagggggcgaaatagagctcttcgacggcgaggtgaacgtgaagagacccatgaaagacgaaactcattttgaagtggtagaatccgggcgatatatcattttgctgctgggcaaggctctttccgtcgtttgggatagacacctgtctatttccgtggtgcttaagcaaacgtatcaggaaaaggtgtgtggcctgtgcggtaacttcgatgggattcagaacaacgacttgacctcaagtaacctgcaggttgaggaggaccctgtggatttcggtaactcctggaaagtgagctctcaatgcgctgatactcgaaaagtgcccttggatagctctccagcaacctgtcacaacaatatcatgaaacaaaccatggtggacagttcctgcaggatcctaacctccgatgttttccaggattgtaacaagttggtcgacccagaaccatatctggatgtttgcatctacgatacgtgttcatgtgaatccattggggattgcgcctgtttctgtgatacaatagccgcatacgctcacgtgtgcgctcagcacggcaaggtcgtaacatggcgcacggctacactgtgtcctcagagttgtgaagagcgtaatctgagggagaacggctacgaatgcgaatggcggtacaactcctgtgcacctgcctgccaggtgacctgtcagcacccagagcccttggcgtgccccgtgcagtgcgtcgaagggtgtcacgcgcactgtccaccggggaaaattctggatgagctgctccagacttgcgtcgaccccgaggactgcccggtgtgtgaggtggcagggaggaggttcgctagcggcaagaaggtgacattgaaccctagcgatccggagcattgccagatctgccattgtgacgtcgtaaacctgacctgtgaggcctgccaagagcccgggggactcgtggtcccacctacagatgcgccggtatcgccaaccacactctacgtggaagacatcagcgaaccccccctgcacgacttctattgctctcgtctgctagacttagtgtttttgctcgacggaagttcacggcttagcgaggctgagttcgaggtgctgaaggcctttgtagtcgacatgatggaaagactgcgtatctcccagaagtgggttcgggtggccgtagttgaatatcacgacgggagtcacgcatacattggcctgaaggacagaaagcgacccagtgagctgaggagaattgcaagccaagttaaatatgcaggctcgcaggttgccagcacttccgaggtgctgaagtacactctgttccagattttctcgaaaattgacagacctgaggcatctagaatcactctgctactcatggcatctcaggagcctcagaggatgagtaggaacttcgtcagatatgtccagggactgaagaagaagaaggtcattgtcatccctgtcggaatcggcccccatgccaacttgaaacagattagactgattgagaagcaagccccagaaaacaaggcttttgtgctaagttcggtggatgagctggagcagcagcgggatgaaatcgtgtcatacctatgtgatctggctccggaagctcccccaccaaccctaccccctgacatggctcaggtgacagtggggccagggttactgggtgtatccaccttgggacctaagaggaactccatggtgctggatgtagcgttcgtcctggaaggaagcgacaagatcggggaggctgacttcaatcgatctaaggagtttatggaagaagtgatacaacgaatggacgttgggcaggattcaatccacgttacagtgctgcagtactcttatatggtgaccgtcgaatacccattcagtgaagcccaaagcaagggagatatcttacagagagtaagagaaataaggtatcagggagggaaccgaaccaacacgggattggcactgcgatatctgtccgatcattctttcctggtgagccaaggagatcgagaacaggcgcccaaccttgtttatatggtgacgggcaatccggctagcgacgaaatcaaacgattgcccggagatattcaggtcgttcccatcggtgtgggccccaacgcaaacgtacaggagctggagaggatcgggtggccaaatgcgcctatcctgatacaagacttcgaaacactgcctcgagaggcacccgatctggtgctgcagcgttgctgcagtggggaaggactgcagataccgaccctgagccccgcccccgactgttctcaaccgctcgacgtgattttactgctggacgggagttccagctttcccgcgtcctatttcgacgaaatgaaatccttcgctaaagcgttcatctccaaggctaacatcggacccaggttaacccaggtcagtgtgctgcagtatggctccatcacaactatcgatgttccatggaacgtggtcccggagaaagctcacttgctttcgttggtggacgtgatgcagagggaaggcggaccatcgcaaattggcgatgccttgggtttcgcagtgcgttacctcactagcgagatgcacggcgctcgacctggtgccagcaaagcagtcgtgatcctggtaaccgacgtctccgttgattctgtggatgccgccgctgacgccgcccgatccaacagagtcaccgtatttcctattgggatcggggatcgttacgatgccgctcagttgcggatcctggccggaccggctggggattctaacgtcgtcaagctccagagaattgaggacctgcccaccatggtgacactgggaaattctttcctgcacaagctgtgctccgggtttgtcaggatatgcatggatgaggacggcaacgagaagagacccggcgacgtctggacccttccggatcagtgccacaccgtcacttgccagccagacgggcagaccttactgaagtcccatagagtgaactgcgatagaggactcagaccttcttgtcctaattcccagtccccggtgaaagtggaagaaacctgtgggtgcaggtggacatgcccctgcgtgtgtacgggctcctccactcgtcatattgtgacattcgatggccaaaactttaaacttacggggtcttgcagttatgtcctctttcagaacaaggaacaggatctggaggtgatcctgcataacggcgcctgctcccccggtgccaggcaaggctgtatgaagagcattgaagttaaacattccgcgttgtccgttgagctgcatagcgacatggaggtcacagtcaatggccgactggtgtcagtcccctatgtcggaggaaacatggaggtgaatgtttatggggctatcatgcacgaagtaagatttaaccacttaggacacatattcacttttaccccacagaacaatgagttccaacttcagctgtcacccaagaccttcgctagcaagacttatggtctgtgcggtatctgtgatgaaaacggtgccaatgactttatgctgcgcgacgggaccgtgaccacggattggaaaaccctggttcaggagtggacagttcagcgacctggtcagacgtgtcagccaatcttagaagaacagtgtctggtgcctgactcaagccattgtcaggtgctcctgttgcctttattcgctgaatgccacaaggtgctcgcccccgcgaccttttacgcaatttgccagcaggatagttgtcaccaagaacaagtgtgcgaggtaatagccagctacgctcacctgtgccgaactaacggggtctgtgtcgactggcgaacacctgatttctgcgctatgagctgtccgccttcactagtttataatcattgtgagcacggctgccccagacattgcgatgggaatgtgagctcttgtggggaccatccctccgagggatgcttttgccccccggataaggtgatgctagagggatcttgcgtaccagaagaggcgtgcacgcagtgtataggcgaggacggagtgcagcatcagtttttggaggcctgggtgccagaccatcagccatgtcagatctgcacttgcctcagcgggaggaaggtgaactgtaccactcagccctgtccgaccgctaaagctcccacctgtgggttatgtgaagtcgcacgacttcgccagaacgcagatcagtgctgcccagaatatgaatgcgtctgtgacccggtgtcctgtgatctgcctcccgtgcctcactgtgagaggggcttgcagccgaccctcactaatccaggtgagtgcaggccgaattttacctgtgcctgcaggaaagaagaatgcaagagagtctccccacctagctgtcccccccaccgtctccctacgctgcggaaaacccaatgctgcgacgaatacgaatgtgcttgtaactgcgtcaattctaccgtgtcctgtccattaggatacctggcttcaaccgccacaaatgattgtggatgtactaccaccacttgtcttccagacaaggtctgtgttcataggtccacaatctaccctgtgggacagttttgggaagaggggtgtgacgtgtgtacctgcaccgatatggaggacgctgtaatgggcctgagggtagcccagtgctctcagaaaccttgcgaggattcatgtagatctggcttcacctatgtgctgcacgaaggcgaatgctgcggccgatgtttgccaagcgcctgtgaagtggttaccggcagtccacgaggggatagtcaaagctcctggaaatcagtgggaagtcaatgggctagtcctgagaatccatgtttgattaacgagtgcgtgcgcgtgaaggaagaggtctttattcagcagagaaatgtatcttgtccacaactggaagttcctgtgtgtccttcaggttttcagctatcctgtaagaccagcgcttgttgccctagctgtcggtgcgaaagaatggaggcttgcatgctgaacggtacagttatcggacccggaaaaactgtgatgatcgatgtgtgtacaacctgccgctgtatggtgcaagtgggcgtgatcagtggattcaaattggaatgcaggaagactacctgtaacccctgtcccctcggttataaagaggagaataatacaggcgaatgctgcggtcgttgtctgcccaccgcctgtacaatccaactccgaggcgggcagatcatgacactgaagagggatgaaaccttacaggatgggtgcgacactcacttttgcaaggtcaacgagcgaggggaatatttttgggagaagagagtcacaggctgccccccttttgatgaacataaatgcttagcggaagggggaaagatcatgaagatccccggcacatgttgtgacacctgcgaagagccagaatgtaatgacatcacagcacgactgcagtatgtgaaggtgggctcctgcaagagcgaagtggaagtggatatccattattgtcaggggaaatgtgcctctaaagccatgtactctattgacattaacgacgttcaggaccagtgcagctgctgtagtccaacacggaccgagcccatgcaagtcgctttgcactgcacaaacggctccgtggtgtaccatgaagtccttaatgcaatggagtgtaaatgttcccctcgcaagtgttcaaag

SEQ ID NO: 21397 - DNA, 8439 bp, synthetic construct
  misc_feature 1..8439: note = source = /note="Description of Artificial Sequence: Synthetic coding sequence"
  source 1..8439: mol_type = other DNA
atgatcccagcccggtttgctggcgtacttctcgccttggcgctcatcctgccagggaccttgtgtgctgaaggcactcggggccgatcaagcactgcccggtgctccctttttggtagtgatttcgtcaatacctttgatgggagcatgtacagcttcgccggatattgttcttacctgctcgcagggggatgtcagaaacggagttttagtataatcggcgactttcaaaatggtaaaagagtgtctctgtctgtctatctgggagagttctttgacatacatctgttcgtgaatggaacagtgacccagggggaccagagggtctccatgccctacgccagcaaaggtctgtatcttgagaccgaagcaggttattacaaactctcaggggaggcatatggatttgtggcacgtattgacggaagtggaaacttccaggtgcttctgagcgaccgctactttaataaaacctgcgggctgtgcggtaacttcaacatcttcgctgaagacgatttcatgacacaagaaggtactcttacaagcgatccgtacgactttgcgaacagctgggccctcagtagcggtgagcaatggtgcgagagggcctccccaccctcgtcctcctgtaatatctcctcaggagagatgcagaaaggactgtgggaacagtgccaattactaaagagcacatccgtcttcgcgaggtgtcaccccctggtggacccggagcctttcgtggcactgtgcgaaaaaacgctgtgtgaatgcgcaggaggattagagtgcgcctgtccagcactcctcgagtatgcacgcacctgtgcccaggagggcatggtcttgtacggctggaccgatcactctgcctgcagccctgtttgtcccgcaggaatggagtataggcagtgtgtgtctccatgcgcccgcacttgccaatctctgcatatcaatgagatgtgccaggagagatgcgtggacggatgcagctgtcccgagggacagctgctagacgaggggctgtgcgtcgagagtacagagtgcccctgcgtgcattcaggcaaacgctaccctccagggacctcactctctcgcgattgcaatacttgcatctgccggaactcccagtggatttgtagtaacgaggaatgtcctggcgagtgtttggtgaccggtcagtctcactttaagtcttttgataacagatactttaccttctccggtatatgtcagtaccttctggcaagagattgtcaggatcattctttctctatcgtgatagagactgtgcagtgcgccgacgaccgggacgccgtgtgcaccagatccgtgaccgtccgcctcccagggttgcacaattcactggttaagttgaagcatggagccggggtagcgatggacggccaagatgttcagctgccacttctgaagggcgatctgcgaatccagcacacagtcacggctagcgttcgactctcgtacggcgaagacctacagatggattgggatggccgtggcagactcctggtgaagctttctcctgtctacgctggcaagacatgcgggctctgtgggaattataacggaaatcagggcgatgactttcttaccccatcagggctcgccgagcctagggtggaggattttgggaatgcctggaaactgcacggagactgccaggacctacagaagcaacattctgacccctgcgctctgaacccccgcatgactaggttttcggaagaggcatgcgccgtgcttacatctcctacttttgaagcctgtcacagggctgtgtcccctctgccatacctcagaaattgtagatacgacgtgtgctcctgtagcgacggcagagaatgcctctgcggcgccttggcttcctatgcagccgcttgcgccgggagaggagtgcgggtggcgtggcgcgagcccggtcggtgtgaattaaattgtccaaagggccaagtgtatctgcagtgtgggacaccgtgcaatctgacatgtcggagtctctcatatccagacgaggagtgtaatgaagcgtgcctggagggatgcttttgccctcctggtctctacatggatgaaaggggggattgcgtaccaaaggctcaatgcccttgttattacgacggcgaaatctttcagcctgaggatatcttctccgaccaccataccatgtgctactgtgaagacggattcatgcattgcactatgagcggagttcctggcagtctgctgccggatgcagttctgagctcccctctttctcataggtcaaagagatctcttagttgtcggccgccaatggtcaagctcgtctgccccgccgacaacctgcgggccgagggactggagtgcactaaaacatgtcagaattatgacttggaatgcatgagcatgggatgcgtgagcggatgcctctgtccacccggcatggtgcggcacgagaataggtgcgtcgcactggagaggtgtccctgctttcaccagggcaaggaatatgctcccggggagactgttaaaattggttgtaatacatgtgtctgccaggacaggaaatggaattgtaccgaccacgtctgcgacgctacttgcagtacgattgggatggctcactatctcacgttcgacgggctgaagtatctcttccccggcgagtgccagtatgtgctggtgcaagactactgtggctcgaatccggggactttcaggattctagtgggaaacaagggctgttcacatccatctgttaagtgtaaaaaacgagttacaattttggtggaaggcggagagatcgaactgtttgatggcgaagtgaatgtaaaacgaccaatgaaagacgagacacacttcgaagttgtggaatctgggaggtatatcattttgctgctcggcaaggccctgtccgtggtctgggacaggcacctgtctatcagtgtcgtcctgaagcagacatatcaggaaaaagtgtgcggcctttgtggaaatttcgatggcattcagaacaatgacctgacatcttctaacctgcaggtggaagaggacccagtggatttcggaaacagctggaaggtgagcagtcaatgcgccgacacccgcaaagttcccctggactccagtccggccacctgccataacaatatcatgaagcagacaatggtggactctagctgccggattctaacatccgatgtgttccaggactgcaacaagctggtagatcctgagccatatttggacgtgtgcatttacgatacatgcagctgcgagtctattggagattgtgcctgtttttgtgacacaatcgcggcatatgcccacgtctgtgcccaacacggcaaagtagtgacgtggcgaacagccaccctttgcccccagagctgtgaggaacgcaacctgcgggaaaacggatacgagtgcgagtggcgctataattcatgcgcacctgcttgccaagtcacgtgtcagcacccagagcctctggcatgtccagtccagtgcgttgaggggtgtcacgcacactgcccgcctggtaagattctggatgaattgctgcaaacttgcgttgacccggaagactgtcctgtgtgtgaggtggcagggcggaggtttgcctcaggcaagaaggtcacactcaacccaagtgaccctgaacactgccagatttgtcattgtgatgtggtgaacctgacctgcgaggcctgtcaggagcctggcggtttggtggtcccacctacggacgcaccagtgagcccgacaaccttgtatgtggaggatatctctgagcctcctcttcatgatttctactgctcccggctactggacctggtcttcctgttagatggatcttcccgcctttcagaggcagagttcgaggtgttaaaggccttcgttgtggacatgatggaaagactgaggatctcccagaagtgggtacgcgtggccgtggttgaataccatgacggctcccatgcctacattggactcaaagatagaaagcgaccctccgagctcaggcgcatcgcctcacaggttaaatatgcaggttcccaagttgccagcactagcgaggtactcaagtacaccctgtttcagatcttctctaagatcgatcgtccagaggccagccgcatcactttattactgatggccagtcaggagccacagcgaatgagccggaatttcgtgcgctacgtgcagggcttaaagaagaaaaaagtcatcgttatccccgtggggataggaccacatgctaacttaaagcagataagattgatcgagaagcaggcacctgagaataaagcatttgtcctcagttctgtcgatgagttggaacaacagcgggacgaaatagtgtcttatctctgtgacctggcaccagaagcccccccccctactctgccacccgacatggctcaggtgaccgtggggccaggcctcctaggcgtgtccactctaggcccaaagaggaacagtatggtgctggacgtagcctttgtgttggagggcagcgacaaaatcggggaagctgacttcaatagaagcaaggaatttatggaggaagttatacaaaggatggacgtcgggcaagacagcattcacgtgacggtgcttcagtactcatatatggtgacagtggaataccctttcagtgaggctcagagtaagggcgatatcctgcagagggtgcgagagattcgctaccagggcgggaaccgaactaatacgggactggcactgagatacttatccgaccattcttttttggtaagccaaggtgacagagaacaggcaccaaatctggtctacatggtgaccggtaaccccgcctctgacgagatcaaaagactcccaggcgatatacaggtagtacctatcggagtcggacctaacgccaatgtccaggagttggagagaatcggctggcctaacgcacccattctgattcaggactttgagacccttccgagagaggcgcctgatttggtgctgcaaagatgctgctctggggagggcttgcagattccaaccctctcaccagctcctgattgtagccagccccttgatgtgattcttttgctagacgggtcaagctcatttccagcctcgtatttcgatgagatgaaatcttttgccaaagccttcattagtaaagccaacatcggcccccggcttactcaggtaagtgtgctgcaatatggatcaattacaacgatcgatgtaccatggaatgttgtcccggaaaaagcccacctgctgtctctagtggacgtaatgcaaagagagggcggtccatcacagataggcgatgcgttgggttttgccgtgcggtacctaacctctgaaatgcacggggcgaggccgggagcctctaaggctgtggtaatattggtgaccgacgtctcggtcgacagcgtggacgctgccgcagacgcagcaaggtctaaccgggtaaccgtgtttccgatagggattggcgaccgctatgacgcagcgcaactaaggattctcgccggacccgctggcgattcaaacgtcgtgaaactgcagcgaattgaggatctcccaacaatggtgaccctagggaactcattcctgcacaagctttgctccggcttcgtcagaatctgtatggatgaagatggcaacgaaaagcgacctggggacgtgtggaccctgccagaccagtgccacaccgttacctgccagccagacggacagaccctgctgaaatctcatcgagtgaactgcgatcgcggcctgcgaccctcatgccctaacagccaaagtcctgtgaaagtcgaggaaacctgtggatgtagatggacctgtccctgtgtgtgtactggctcatccactcgccatatagtgacatttgacggccaaaatttcaagctcaccgggagctgtagctatgttctgttccaaaacaaagaacaagacttggaggttattctgcataacggtgcctgcagtcccggcgccaggcagggctgcatgaaaagcatagaggtgaagcactcagctctgtctgtggagctgcactccgacatggaggtcaccgttaacggccgattggtgagcgtgccatacgtcggaggcaacatggaagtgaatgtgtacggagctataatgcacgaagtgagattcaatcacttggggcatatcttcacctttaccccccaaaacaacgaattccagttacagctgtcacccaaaacatttgcttccaaaacttatggtttatgcggcatctgtgacgaaaatggagccaatgactttatgctgcgcgacggaaccgttacaacagattggaaaacgctggttcaggaatggaccgtccaacgccccggacaaacttgccagcctatattggaggagcagtgtttagtcccagattcttcgcactgtcaggtgctcctgcttcccttgtttgccgaatgtcataaggttctcgcaccagcaacgttttacgcaatctgtcaacaggattcttgccaccaggaacaagtgtgtgaggtcattgcatcctacgcccacctatgccggacaaatggtgtctgtgtggattggagaaccccggatttttgtgccatgtcttgccctccatctctcgtgtacaatcattgcgaacacggttgtcccaggcactgcgacggcaatgttagttcctgcggggaccatcccagtgagggctgtttctgtccacctgacaaagtgatgctcgaaggttcatgtgtccctgaggaggcctgtactcaatgtattggggaggacggagtgcagcatcagtttctggaagcatgggtccccgatcatcagccctgccagatctgtacctgtctttccggaaggaaggtcaattgcaccacacagccctgtccaacggcgaaagcccccacttgtggactgtgtgaggtggccagactgcgccaaaacgctgatcagtgttgtcctgaatacgaatgtgtttgtgaccccgtgtcctgtgatctcccccccgtaccgcactgtgaacgaggcctgcagcctactctcactaacccgggggaatgccggccaaattttacatgtgcttgcaggaaagaggaatgcaaacgcgtctctcccccatcctgcccgccacaccggctacccactctgaggaaaactcagtgttgcgatgaatacgaatgcgcgtgtaattgcgtcaatagtaccgtaagctgtcctctcggctatcttgcctccacagcgacaaacgactgcgggtgcactacgacaacatgcctgccagataaggtgtgtgtgcacaggagtactatctatcctgtgggacaattctgggaagaaggctgtgatgtgtgcacctgtactgatatggaagacgccgtgatgggactgcgagttgcacagtgctcccaaaagccgtgcgaggatagctgccgtagcggattcacatatgttctccatgagggcgaatgttgtggcagatgcctgccctccgcatgtgaggtggtgacaggaagtcctcgcggggattcccagtcgagttggaaatcagtgggctcgcagtgggccagcccggagaacccctgcctcataaacgagtgtgtccgcgtgaaggaagaggtcttcatccagcagagaaacgtgagctgcccgcagttggaggtgcctgtgtgtccctccggcttccagctctcttgcaaaacgtctgcatgttgcccttcgtgtagatgcgaacgcatggaggcgtgtatgctgaatggcaccgttatcggcccaggaaagaccgttatgatcgacgtatgcacaacttgccgttgtatggtacaggtgggcgtaatctcaggattcaaactagaatgcaggaagacgacatgtaatccttgtcccctgggatacaaggaggagaataatacaggagaatgctgcggtcgatgcctgccgacagcctgtaccatccaattgcggggcggacaaatcatgaccctgaaacgcgatgaaacactgcaggacggatgtgatacacacttttgcaaagtcaacgaacgcggggagtacttttgggaaaagagagttaccggctgtcctccctttgacgaacataaatgtttggccgaaggtggcaaaatcatgaagatacccgggacgtgctgtgacacatgtgaagaacccgaatgtaacgacatcactgcaaggctccaatacgtcaaagtgggcagctgcaagtctgaggtggaggtcgatatacattattgccaaggcaagtgcgcttccaaagcaatgtatagcatagacatcaatgacgtccaggaccaatgtagctgctgttctcccacacggaccgagccaatgcaggttgccctgcattgcaccaacgggagcgtggtttaccacgaggtcctcaatgccatggagtgtaaatgctcgccgcggaagtgttccaag

SEQ ID NO: 21398 - DNA, 8439 bp, synthetic construct
  misc_feature 1..8439: note = source = /note="Description of Artificial Sequence: Synthetic coding sequence"
  source 1..8439: mol_type = other DNA
atgatcccagccaggtttgccggggttctacttgccttagccttgatccttcccgggacactttgtgctgaggggacacgcggccggagttctaccgctcgatgtagcctgttcggttctgattttgtgaatacgttcgacgggtctatgtactcatttgccggctattgctcctacctactggctggcgggtgtcaaaagcgcagcttctcaatcataggcgattttcagaacgggaaaagggtgagtctgagtgtttacctcggagagttttttgatatccacttatttgtgaacggcactgtcacacagggcgatcagagggtctcgatgccatacgccagcaaaggtctctatctggagacagaggccggttactataagctgtccggcgaagcctatggcttcgtagctaggattgacggttctggcaacttccaggttctcctgagtgataggtatttcaataagacttgcgggctgtgcggtaactttaacatattcgcagaggacgacttcatgacccaggaagggacactgacctctgacccctatgacttcgcgaacagctgggccctcagttccggcgaacaatggtgcgaaagggccagccctccaagctcaagctgtaatatcagttctggggaaatgcaaaaggggctgtgggaacagtgccagctgctaaaaagtacatctgtctttgccagatgccacccattagtggaccctgagccgttcgtggcgttgtgtgagaaaactctgtgtgagtgtgctggaggactggagtgcgcgtgccccgcccttctggagtacgcgaggacctgcgcccaggaagggatggtgctatatggctggacagaccactccgcctgttcccccgtttgccccgcgggcatggagtatcggcagtgcgtgtcaccctgcgctcgtacatgccagagtttgcatatcaacgagatgtgtcaggagagatgcgtggacgggtgcagctgccccgagggccagctgcttgacgaggggttgtgtgtcgaatccacagaatgcccatgcgtgcattctggcaagcgctaccctccgggaacgtccttgtccagagactgtaatacttgcatttgcaggaacagtcagtggatctgtagtaatgaagagtgccctggagaatgtcttgtgacagggcaatcccactttaaaagctttgacaaccgctattttaccttcagcggcatctgccaatatctgttggcccgggactgtcaggaccactctttttctatcgtcatagaaacggtgcaatgcgctgacgatcgggatgcagtatgcacccggtctgtcacagtgcggctccccggactccacaactcactagtgaaactgaagcacggcgccggtgtcgcgatggatgggcaggacgtccaattacctttactcaagggggatctgagaattcagcacacagtgactgcttcagtgcggttgtcgtatggcgaggatctgcagatggactgggatggccgggggagattgctcgttaaactctctccagtttacgccgggaagacatgtgggctgtgtggcaactacaacggcaatcagggagacgattttctcaccccctctggactggccgagcccagggttgaggactttggaaatgcatggaagcttcatggggactgtcaggacctacagaaacagcattcggacccttgtgccctcaaccctaggatgactcgtttttctgaagaagcttgcgccgtgttgacctcaccgacttttgaagcctgccacagggccgtgagtcctctgccctacctgaggaactgccgatatgacgtgtgttcatgttcagatgggcgcgaatgcctttgcggggccctggcctcatatgccgccgcttgtgcaggacggggagttagagttgcctggagagagccgggccggtgtgagctgaactgcccaaaaggccaagtttatttgcagtgtggtaccccatgtaatcttacttgtcggtcactgtcctaccctgacgaagaatgcaacgaggcatgcctggagggctgcttctgcccccccggactgtacatggacgaacgaggcgactgcgttcctaaagcccagtgcccgtgttattacgacggcgaaatctttcagccagaggacatattcagcgaccatcatacaatgtgttactgcgaggatggattcatgcactgtacgatgtccggcgtgcctgggagtcttctgccggatgctgtactgtcctcccccctctcccatagatcgaagaggagcctgagctgtcgacccccaatggtgaagctcgtgtgccccgccgataatcttcgagccgaggggctcgaatgtacaaagacatgccagaactacgaccttgagtgcatgtctatgggctgcgtgagtggctgcctttgtccacccgggatggtgagacatgagaatcgatgcgtcgctttggagcgctgtccgtgctttcaccagggtaaagaatatgctcctggtgagaccgtcaagatcggctgcaatacctgcgtgtgccaggacagaaagtggaactgcaccgatcatgtgtgtgatgccacctgctcgaccattggaatggcccattatctgacgtttgatggactgaaatacctgttcccgggggaatgtcagtatgtgctcgtgcaggactattgtggttccaatcctgggactttcaggattcttgttggaaataagggctgcagccacccaagtgtgaagtgtaaaaagcgcgtgactatccttgtggagggaggcgagatcgaactctttgatggcgaagtgaacgtcaagaggcccatgaaggatgagacgcacttcgaggttgtcgagagcggacgctacataatcctgctgctggggaaagcccttagtgtggtgtgggatcgccacctcagtatttctgttgtactcaaacaaacgtaccaggaaaaggtctgcgggttgtgtggtaacttcgacgggattcagaataatgatttgacaagttctaaccttcaggtagaggaggacccagtagactttggaaatagttggaaagtaagctctcagtgcgctgacacaagaaaggtgcctttggattccagcccagctacatgccataacaatatcatgaagcaaaccatggtggattcttcctgtcgaatcctaacgagtgatgtcttccaggattgcaataagctggttgatccagagccttacctggacgtgtgcatctacgacacatgttcttgcgagagtataggcgattgtgcctgtttctgcgatacaattgccgcttatgcccacgtgtgcgcccagcacggtaaggtggtgacttggcgaacagccaccttgtgtccacagtcttgtgaggagaggaatctccgcgaaaatggctatgagtgcgagtggcgatacaattcttgtgcgccggcctgccaggtgacttgccagcacccagagcccttggcatgtcccgtgcagtgcgtagagggttgccatgcccactgtccccccggcaaaatactggatgagttgcttcagacatgtgtagatccagaggattgtccagtgtgcgaagtggctggcaggcgatttgcctcaggaaaaaaggtgacattgaatccctccgatcctgagcattgccagatctgccactgcgatgttgtcaacttgacctgcgaggcatgtcaagagcccggcggcctagtggtccctcccactgatgccccagtctctccaacgaccctgtatgtggaggatatatcagagccccctcttcacgacttttattgctctaggctgctcgacctcgtgtttctgcttgacggatcaagccggctgagcgaagccgagtttgaggttttgaaagccttcgtcgtagacatgatggagcgtctgcgaatcagccagaaatgggttcgtgtagcagtcgtggagtaccacgacggcagccacgcatacattggcctgaaggatcggaaacggccatcagaactgcggaggatagcatctcaagtgaaatacgctgggtcacaagtggcaagtacatccgaggtgcttaaatataccctgttccaaatcttttcaaaaattgatcggcccgaagcctctcgcattaccctcctcctgatggcttcacaggagccccaaagaatgtctaggaattttgttagatacgtgcaaggcctgaaaaagaagaaggtcatagtcatacccgtcggcatcggtccccacgcgaacttaaagcagatccggctgattgaaaagcaggcccctgaaaataaggcgttcgttctgtccagtgtcgacgagttggaacaacagcgagacgaaatagtgagctacctatgcgatctggccccagaagccccgccaccaactctcccaccagacatggcgcaagttactgttggccccggcttgctgggcgtgtctaccctggggcctaagaggaattctatggtccttgatgttgcctttgttcttgaagggtctgacaagatcggggaggccgattttaaccgatctaaggaattcatggaagaggtgatccagcgaatggacgtggggcaggactcaatccacgtcaccgtgctgcaatacagctacatggttaccgtggaatatcccttttctgaggcccagtctaagggtgatattctccagcgggttcgagagattcgctaccaagggggtaaccgcacaaacacaggcttggccttgagatatctgtcagatcattcgttcctggtatcccagggagacagagaacaggccccaaatctggtgtacatggttacgggcaacccggccagcgatgaaataaagcgattacctggtgacatccaggtcgtcccaattggcgtgggtccaaatgcaaacgtgcaggaacttgagcggataggatggccgaacgcgcccatacttatccaggatttcgaaaccctgcctcgggaagcacccgatctggtcttacagcggtgctgctctggagagggcctgcagattccaacactttcccctgcaccagattgtagtcagccgctcgatgtaattcttctgctcgatggatcatcaagtttcccagcatcgtactttgacgaaatgaaaagcttcgccaaggcatttatttccaaggcaaacatcggccctaggctcacgcaggtgtccgtgctccagtatgggtctatcaccactatcgacgttccttggaacgtagtgccagaaaaagcccatctgctgagcctggttgacgtcatgcagcgggagggaggcccctctcagatcggggatgccctggggttcgcagtgagatacttgacgtccgagatgcatggcgccaggccaggggctagtaaagctgtggtcatcttagtgactgacgtgtctgtagattccgtggatgccgctgccgacgcagcgagatccaatagggtgaccgtttttcccatcggtataggtgatcgctatgacgcggcccagctccgcatcttggccgggcccgccggggactccaatgtggttaaactgcagcgaattgaggacctgccaacgatggtgaccttaggtaactcttttctgcataaactatgctctgggtttgttaggatatgtatggatgaagatggaaatgagaagagaccaggcgacgtttggaccctgccagaccagtgtcacacagtcacatgccagccagatgggcagacactactgaagtcccacagagtgaattgcgacagaggtctgcggccgagctgcccaaactcccaatcccccgtcaaagtggaagagacatgtggttgtagatggacctgtccatgcgtttgtactggatcttctacacgccatatcgtgacgtttgatgggcagaatttcaagcttaccggtagctgctcttatgttctgttccagaacaaggaacaggacctggaagtaatactccacaatggagcctgtagtcccggcgcacggcagggatgtatgaaatccatcgaggttaaacattctgctctttcagtggaattacactctgatatggaggtcaccgtgaacgggaggctggtttccgtcccttatgtcggcggaaatatggaggtgaacgtctacggtgctatcatgcacgaggtacggtttaatcacctgggccacatatttaccttcaccccacagaataacgagttccagctgcagctctccccaaaaacgttcgcaagcaagacttacggactctgcggcatctgcgacgagaacggcgcaaatgacttcatgttgcgtgacggcactgtgactaccgattggaaaactctcgtccaggaatggaccgttcagcgacctgggcagacttgccagccgatcctggaggagcagtgcttggtcccggattcttctcactgccaggtgctgctgctgcctctgtttgcagagtgccacaaggttcttgcccctgccactttctatgcgatatgccagcaggactcatgccaccaggaacaggtgtgcgaggtcattgcaagctacgctcatctgtgcagaacgaatggcgtatgcgtcgattggcggactcctgatttctgtgcgatgagctgtcccccttctctggtgtataaccactgtgagcacggatgtccaagacactgcgatggcaacgtttctagttgcggcgatcacccctctgaagggtgcttctgtcctccagataaggtcatgttggagggatcctgtgtacccgaagaggcctgcactcagtgtattggggaagacggggtccagcatcagtttctcgaagcttgggtccccgatcaccagccttgccagatatgtacttgtctgtctggtcggaaggtgaattgtacaactcagccatgccctacggccaaagcaccaacctgtgggctttgcgaggtagcaaggttgcgtcaaaacgctgatcagtgttgtccagaatacgaatgcgtttgcgacccggtttcctgcgacctgccgccggtgccacactgcgagcggggcctgcagcctactcttactaaccctggtgaatgccggcctaactttacctgtgcatgtaggaaagaagaatgcaagcgcgtgtcgcctccatcatgcccaccacatcggttgccaaccctacgcaaaacccagtgctgcgatgagtacgaatgcgcatgtaattgtgtcaacagcaccgttagttgtccactaggatacctcgccagcaccgctaccaatgattgtggatgtacgacgaccacctgtctgccagataaagtctgcgttcaccggtcaaccatttatcccgttggacaattttgggaggagggatgtgatgtatgcacatgcacggatatggaagatgccgtaatgggcctacgggtggcacagtgctctcagaagccatgtgaggatagctgccgctcgggattcacctacgttctgcacgaaggtgaatgctgtggtcgctgcttgccatcggcatgtgaggtggtgaccggatccccccgtggtgatagccagagtagctggaaaagtgtgggcagccagtgggcgagtccagaaaacccatgtctcatcaacgaatgtgttcgcgtaaaagaggaggtcttcattcagcaacgaaacgtgtcctgccctcagctggaagtgcctgtctgtccgtctggctttcagcttagctgtaaaacatccgcctgctgtcctagctgtcgctgtgagagaatggaggcttgcatgctgaacggcaccgtcattggacccggcaagactgtgatgatcgacgtatgtactacctgtcgctgcatggtgcaagtaggggtaatctctgggttcaaactggaatgcagaaagacgacttgtaacccctgtcctctgggctacaaggaggagaataatacaggtgagtgttgcggcaggtgtttacccaccgcttgtacaatccagctacgtgggggccaaatcatgaccctcaagcgggatgagacccttcaggatgggtgcgatacccacttttgtaaggtcaacgaacggggcgagtatttctgggagaagagagttactggatgtccacccttcgacgaacataagtgcctggccgaaggcggcaagattatgaagattcctgggacatgctgcgatacatgtgaggaacccgaatgtaacgacatcacagcaagactgcagtatgtgaaagtggggagctgtaagagtgaggtggaggtggatattcattactgccagggcaaatgcgccagcaaagccatgtacagtatcgatataaacgatgtgcaggatcagtgcagctgctgttctcctacaagaaccgagccaatgcaggttgcgctacattgcactaacggcagtgttgtctatcacgaagtgctgaacgcaatggagtgtaaatgttctcctaggaaatgtagtaag

SEQ ID NO: 21399 - DNA, 8439 bp, synthetic construct
  misc_feature 1..8439: note = source = /note="Description of Artificial Sequence: Synthetic coding sequence"
  source 1..8439: mol_type = other DNA
atgatcccggctcggttcgcaggggtgcttctcgctctggcactgatcctccccggcactctgtgcgctgagggaacgcggggcagaagttcgacggctcgctgctcgttgtttggctcggactttgtgaacacttttgatggaagcatgtattccttcgccggatactgctcgtacctcctcgcgggaggatgccaaaagcgctccttttcaatcatcggcgacttccagaatggaaaacgcgtctcgctcagcgtctacctcggagagttcttcgatatccacctcttcgtgaacggcacggtcacccaaggtgaccaacgcgtgagcatgccgtacgcctcaaagggcctttacttggagactgaggctggatactacaaactgtccggcgaggcttacggattcgtggcccgaattgacggctctggtaatttccaggtgctgctctctgaccggtacttcaataagacctgcggtctttgcggaaacttcaacatctttgccgaagatgacttcatgactcaggaaggcaccctcaccagcgacccttacgatttcgccaacagctgggccctttcctccggcgaacaatggtgcgagagggcctcacctccatcctcatcatgcaatatctcctccggtgagatgcaaaaaggcctgtgggagcagtgtcagctgcttaagtcgacctcggtctttgcgcgatgccacccgctggtggacccagagccgttcgtggcactgtgcgaaaagactctctgtgaatgtgcgggcggattggaatgtgcctgcccggccctgctggaatacgcgcgcacttgcgctcaggagggaatggtgctctacggatggaccgaccattcagcgtgctcaccagtgtgcccggcgggaatggagtacagacagtgcgttagcccatgcgcccgcacctgccaaagccttcacatcaatgagatgtgccaggagagatgcgtcgacgggtgcagctgtccggaaggacagctcctggacgaaggactctgcgtggagagcaccgaatgcccttgcgtgcattccggaaagcggtaccctcctgggactagcttgtctcgcgattgcaacacttgcatctgccgcaactcgcagtggatctgctccaacgaagagtgcccaggagagtgcctggtgactggacagtcacatttcaaatcgttcgacaatagatactttaccttttccggcatctgccagtacctcctcgcccgggactgtcaggaccactccttctctatcgtgattgaaactgtgcaatgtgccgacgaccgagacgcggtctgtacccgcagcgtgactgttcgcctgccaggcctgcacaacagcctggtgaaactgaagcacggtgcaggtgtggctatggatgggcaggatgtgcaactccccctcctcaagggagatttgagaatccagcatactgtgacggcatcggtgagactgagctacggcgaggacttgcagatggactgggacgggcgcggccgactgctggtgaagctctcgccagtgtacgcaggaaaaacttgtggcctgtgcggaaactacaacggcaaccagggggacgacttcctcaccccgtcaggactggcagagccccgcgttgaggacttcgggaatgcgtggaagctgcacggcgattgccaggatttgcagaaacagcactcagacccctgcgctctcaaccccaggatgactcggttttcagaagaagcgtgcgccgtcctcacttcgcccaccttcgaagcatgccatagggccgtgtcgccactcccatacctgcgcaattgccgctacgatgtgtgtagctgctcagacggaagagagtgtctgtgcggcgcccttgcgtcatacgctgcagcctgcgcaggacggggagtgagagtcgcctggagagaacctggcagatgtgaactgaattgtccaaagggccaagtctacctccagtgcggaaccccgtgcaatctgacttgcaggagcttgtcctacccggacgaggagtgcaacgaagcatgcctggagggatgcttttgtcccccggggctgtacatggatgaacgcggagactgcgtgccgaaggcccagtgcccgtgttactacgacggagagatattccaaccagaggacattttctcggaccaccataccatgtgctactgcgaggacggcttcatgcattgtaccatgagcggagtcccgggctcgctcttgccagacgccgtgctgtcctccccactgtcccacaggtcgaagcggtcgctgtcgtgtcgcccgccgatggtcaaactggtgtgcccggctgataacctgcgggcggaaggcctggagtgcactaaaacgtgtcaaaattacgatctggaatgtatgtcgatgggatgcgtctcgggatgcctgtgcccgccgggaatggtgcgacacgagaaccgctgcgtggcgttggaacgctgcccttgtttccaccaaggcaaggaatacgcaccaggagaaaccgtcaaaatcggatgtaacacttgtgtctgccaggatcgcaagtggaactgcaccgaccacgtctgcgacgccacgtgctcgactatcggaatggcccactacctcaccttcgacggactcaagtatctgttcccgggggagtgtcagtacgtgctggtgcaagactattgtggatccaaccctggaactttccggatcctggtcggcaacaaaggatgttcacacccatcggttaaatgcaagaaacgggtgacgatcctggtggagggcggagaaatcgaactgttcgatggtgaggtcaatgtgaagcggccgatgaaagatgaaacccattttgaagtcgtggagtcgggacggtacatcatcctgctgcttggcaaggcattgagcgtggtatgggacagacacctctcaatcagcgtggtgctgaagcagacctaccaggagaaggtgtgtggcctgtgcggcaactttgatggtatccagaacaacgatctgactagttcgaatcttcaggtggaggaagatcctgtcgattttggtaactcgtggaaagtgtcatcacaatgcgccgacactcgcaaggtgcctctggattcgtccccggccacttgccataataacattatgaagcaaactatggtggacagtagctgcaggatactcacctccgatgtctttcaggattgcaacaagctggtcgatcccgaaccgtacctcgatgtgtgtatctacgacacctgctcctgcgagtccattggggactgtgcatgtttctgcgataccattgctgcttacgcacatgtctgcgctcagcacgggaaggtggtcacttggcgcaccgccactctgtgcccacagagctgcgaggaacgcaacctgcgggaaaacggatacgaatgcgaatggcgctataacagctgcgctccggcctgccaggtgacttgccaacaccctgaaccactggcgtgcccggtgcaatgcgtggagggatgtcatgcccattgccccccgggtaagatccttgacgaactgctccagacctgcgttgacccggaagattgccccgtttgcgaagtggcagggcggagattcgcctccggtaagaaggtgactctgaacccgtcagacccagaacactgccagatttgtcattgcgatgtggtcaatctgacctgcgaagcgtgccaggaaccaggcgggctcgtggtcccacctaccgatgccccggtgtccccgaccaccctgtatgtggaggacatctctgagcctccgctccacgatttctactgctcaagactgctggatcttgtgttcctgttggacggatcatcccgcctgtcggaggcggagttcgaggtgttgaaggcttttgtcgtcgatatgatggaaaggctgagaatttcccaaaagtgggtgcgcgtggcagtggtcgaataccacgacggatcgcacgcgtatatcggactcaaggatagaaagaggccgtccgagctgcggcgtattgcctcccaggtgaagtacgccggatctcaggtggcctccacctcggaagtcctgaagtacaccttgtttcaaatcttcagcaagattgacagacctgaggcatcccggatcaccctgctgctcatggcttcacaggaaccgcaacggatgtcgcggaacttcgtgcggtacgtgcaaggactgaagaagaagaaggtgattgtaattccagtgggaattgggcctcatgcaaatctcaagcaaattcgcttgatcgagaagcaggcaccagagaacaaagcgttcgtgctctcgtcggttgacgagctggaacagcagcgcgatgaaatcgtgtcctacctctgtgacttggccccggaggccccgcccccgactctcccgccggatatggctcaggtcaccgtgggccctggccttctgggagtttcaactctgggacctaagcggaacagcatggtgctcgacgtggcctttgtgctggaggggtcagataagatcggagaagcggatttcaaccggtctaaggaattcatggaagaagtgatccagcggatggacgtcgggcaagactcgatccacgtgactgtgctccagtactcctacatggtcaccgtggagtaccccttctcagaagcacagtcgaagggagacatcctccagcgcgtgcgcgaaatcagataccagggaggcaatcggaccaacactggactggcactccggtacctgtccgaccactcattcctggtgtcccagggcgaccgcgaacaggcgcccaacctggtctacatggtgacgggaaaccctgcctccgatgaaatcaagcgactgccgggagatatccaagtggtcccgatcggcgttgggcctaacgccaacgtgcaggagctggagcgcatcggttggcctaatgccccgatcttgatccaggacttcgaaacgctcccgcgcgaagctcctgatctggtgctgcaacggtgttgctcaggggagggcctgcagatcccaacgctgtccccggcaccagactgctcccagcctctggatgttatcttgctgctggacggttcctccagcttcccagcgagctacttcgacgaaatgaagagcttcgccaaagcattcatctccaaggcgaacatcggacctcggcttacgcaagtgtcagtgctccagtacggttccatcaccaccatcgatgtcccgtggaacgtggtcccggagaaagctcatctgttgtcacttgtggatgtcatgcagcgggagggaggtcccagccagattggtgacgcccttggatttgccgtcagatacctgaccagcgagatgcatggagccaggccgggggccagcaaggctgttgtcatcctggtgactgacgtatccgtcgactccgtggacgccgccgccgacgccgctcggagcaatagggtgaccgtgttccccatcggtatcggtgacagatacgatgcagcccagctgagaattctcgctgggccggccggagactctaacgtagtgaagctccaacgaatcgaggatctgcccacgatggtcaccctcggaaattcatttctccataagctctgctcaggattcgtcagaatctgcatggacgaagatggaaacgagaaaagacccggagatgtctggactctcccagaccaatgtcacactgttacttgtcaaccggatggacagaccctgcttaaatcacatcgggtgaactgtgatcgggggctgaggccaagctgcccgaatagccagtcgccggtcaaggtggaagagacttgcggatgccgttggacctgcccttgcgtgtgcacgggcagctcaacccgccatatcgtcacgttcgacggccaaaacttcaaactcactggctcgtgctcctatgtgcttttccaaaataaagaacaagacctggaggtgattctgcataatggagcctgctcaccaggagcaaggcaaggatgtatgaagtccatcgaggtcaagcattcggccctgagcgtcgagttgcattcggatatggaggtgactgtgaacggacgcctcgtgtccgtgccatacgtcggcggaaacatggaggtgaacgtgtacggcgcgatcatgcacgaagtcaggtttaatcacctgggtcatatcttcaccttcacccctcaaaacaatgagttccaactccagttgagccctaagacttttgcctccaaaacctacgggctctgcgggatctgcgacgaaaatggagcgaatgactttatgttgcgcgacggaaccgtgaccaccgactggaaaaccctggtccaagaatggactgtgcaacgcccgggacagacctgccaaccaatccttgaagaacaatgcctggtgcccgacagctcgcactgccaggtgttgctgcttcccctgtttgcggaatgtcacaaggtcctggcgcccgccacgttctacgcaatctgccagcaggactcgtgtcaccaagaacaggtgtgtgaggtgatcgcgtcgtacgcccacttgtgccgcaccaacggggtgtgtgtggactggcgtactccagacttttgcgctatgtcgtgcccgccgagcctggtctacaaccactgcgaacacggctgcccgcggcactgcgacggaaatgtgagctcgtgcggggatcacccgtcagaagggtgcttctgcccgccggacaaggtcatgctggaaggatcctgcgttccagaggaggcttgtacgcaatgcatcggagaagatggagtgcagcaccagttcctcgaagcatgggtgccggatcatcagccatgtcagatctgcacgtgtcttagcggacgcaaggtgaactgcaccactcaaccttgcccgactgcgaaggccccaacttgcggactgtgcgaagttgcgcggttgagacagaacgcggaccaatgttgccccgaatacgagtgcgtgtgcgacccagtctcgtgtgacctgccgccagtgccacactgtgaacgcggacttcagccgactcttactaaccccggtgaatgcagaccaaatttcacctgcgcgtgccggaaggaggaatgcaaacgcgtgagtccgccgagctgcccaccacatcgcctccctaccctccgcaagacccagtgctgtgatgagtacgaatgcgcatgtaattgcgtgaacagcaccgtctcctgcccgctggggtacctggcgtcgaccgcgactaacgattgcggatgcactactactacgtgcctcccggataaggtctgcgtgcacagatcgactatctaccctgtgggacaattctgggaggaaggatgcgacgtgtgtacctgcaccgacatggaggacgcggtcatgggcctgagggtggcgcaatgctcccaaaaaccgtgcgaggacagctgccgctcaggatttacttacgtgctgcacgaaggagagtgttgcggacgttgccttccttccgcctgtgaagtggtcaccggttcaccgaggggcgacagccaatcgtcttggaaatcggtggggtcccagtgggcgtccccggaaaacccttgcctgatcaatgaatgcgtcagggtcaaggaagaagtgttcatccaacagcggaatgtctcgtgcccacagctggaagtcccagtctgcccgtcaggattccagctgtcctgtaagactagcgcctgctgtccatcgtgcagatgcgaacggatggaagcctgcatgctcaatggtaccgtcatcggacctggaaagaccgtgatgatcgatgtctgcaccacctgtcggtgcatggtgcaggtgggcgttattagcgggttcaagctcgagtgccggaaaaccacttgcaacccatgccctctgggttacaaggaagagaacaatactggggaatgttgtggaagatgtctgccgactgcctgtaccattcagctccggggtggacagatcatgactctcaagagggacgaaaccctccaggatggctgcgatacccacttctgcaaggttaacgaacgcggcgagtatttctgggagaaacgggtgaccggctgcccgccgttcgatgaacacaaatgcctggcagaagggggaaagatcatgaagatcccgggcacctgttgcgatacttgcgaagagcctgaatgtaatgacatcactgcacgcctgcagtacgtgaaggtgggtagctgtaaatccgaagtggaggtggacatccattattgccagggtaaatgtgcctcgaaggccatgtactcgatcgacatcaatgatgtgcaggaccaatgctcgtgttgttcgccaacccgcactgagcccatgcaggtcgctctgcactgtaccaatggatcggtggtgtaccatgaagtgctgaacgcgatggaatgcaaatgctcgccgagaaaatgctcaaag

SEQ ID NO: 21400 - DNA, 8439 bp, synthetic construct
  misc_feature 1..8439: note = source = /note="Description of Artificial Sequence: Synthetic coding sequence"
  source 1..8439: mol_type = other DNA
atgatcccggccaggttcgccggggtgctgcttgcacttgccctgatattaccggggacgctttgcgcagaagggacccgcggacgatcatctactgccagatgctctctgttcggcagtgacttcgttaacacattcgacgggagcatgtactcctttgccgggtattgttcctatcttctggctgggggatgccaaaagcgcagctttagcattattggtgattttcaaaatggaaagcgcgtcagcctgagtgtctacctgggcgaattcttcgacatacatctgtttgtcaacgggacagtcacccaaggtgatcagcgcgtcagcatgccatacgccagcaaggggctgtaccttgaaactgaagcgggatactacaaactgagtggtgaggcttatggatttgtggcccggattgacggctccggaaattttcaggtactgttatcggaccggtactttaataagacttgcggcttgtgtggcaatttcaacattttcgctgaggacgacttcatgacacaagaggggactctgacttcagacccctacgacttcgccaattcttgggccctttcctccggtgagcagtggtgcgagagggccagtccaccctccagctcctgcaatatcagctccggcgagatgcaaaaagggctttgggagcagtgtcaactactaaagagtacctccgtgttcgctaggtgccatcccctggtggatccagaaccatttgttgcactgtgtgaaaaaaccctgtgtgagtgcgctggaggattggagtgtgcctgtccagccctgctggagtatgcccgtacctgcgctcaggaagggatggtgttgtacggctggacagatcacagtgcctgcagtcccgtgtgcccagccggtatggagtaccgacagtgtgtgagcccctgcgcacgaacctgccagtcactacatattaatgagatgtgccaggagaggtgcgtggacggctgtagctgcccagagggccaactgctggatgaaggactttgcgtagagagcaccgagtgtccttgcgtgcactcaggtaaaagataccctccaggcactagtttgtcacgagactgtaatacatgcatatgtcgtaattctcagtggatttgttccaatgaggagtgccccggcgagtgcctggtcaccggccagtctcactttaagtccttcgataatcgttacttcacttttagcggaatctgccagtaccttctggctcgcgattgtcaggatcacagcttttcaattgtgattgagactgttcagtgcgctgacgatagggacgctgtgtgcacacggagtgttacagtacgattgcctggactccacaatagtctggtcaaacttaagcacggggcaggagttgctatggacggacaggacgtgcagttgcccttactcaaaggggatctaaggatccaacacacggtgactgcctctgtgcggctttcctatggtgaagacctccagatggattgggacggacgggggcgtctcctggtaaaactgagccccgtttatgccggcaaaacttgcggcttgtgcggaaattacaatggtaaccagggcgacgacttcttgacaccttctggtcttgccgagccccgcgtggaggactttggcaatgcatggaagttgcacggcgattgccaggatttacaaaagcagcactcagatccatgcgcactgaaccccaggatgacaaggttcagcgaggaagcctgcgccgtgcttacctctcctacttttgaggcctgtcaccgcgcagtctccccacttccttacctcagaaactgccggtacgatgtttgctcctgctcagatggtcgggagtgtctgtgcggtgctctggccagctacgcagcagcatgtgccggccgcggagtgagggtagcatggcgggaacccggcaggtgcgaacttaattgtccaaaggggcaggtgtacttgcaatgtggcacaccttgcaacttaacctgtcggtcactgtcatatccagacgaggagtgcaacgaggcatgtcttgaagggtgcttttgcccccctgggctctatatggatgagcggggggactgtgtccccaaggctcagtgcccatgttattacgatggagagatatttcagccagaggatattttttccgatcatcacacaatgtgttactgtgaggatggctttatgcactgcacaatgtccggcgtgccgggctccctgctccccgatgccgtgctgtcctcgcctcttagccaccgtagcaagcggtcactgtcgtgtcggcctcccatggttaaactggtttgtcctgcagacaatttgcgggccgagggtttggagtgcactaaaacttgccagaattacgatttggaatgtatgtccatgggctgcgtaagcggctgtctttgcccgcctggaatggtcagacatgagaaccgatgcgttgcactggaacgatgtccgtgcttccaccagggcaaggagtatgctcccggcgagaccgtcaagataggctgcaatacatgtgtgtgccaggaccgaaaatggaattgcactgaccatgtgtgcgacgccacatgttctaccataggaatggctcactacctgacattcgacggcttaaaatacctttttcctggcgaatgtcagtacgtcctggtgcaggactattgcggctccaaccccgggacgttcagaatcctagtgggcaacaagggatgtagccatccaagtgtgaagtgcaaaaaacgagtgacaatactcgtggagggtggtgagatagagctgtttgacggcgaggtgaatgtgaagcgcccaatgaaagacgagacacatttcgaggtggtcgaaagtggtcggtatataattttgcttttaggcaaggctttatcagttgtttgggacaggcacctctctatctccgtggtgcttaagcagacataccaggagaaagtttgtgggctatgcggtaattttgacgggattcaaaacaacgacttgacctcctccaaccttcaggtggaagaggatcccgtcgatttcggcaatagttggaaagtgtcatcacagtgcgcggacacccgtaaggtgccattggacagtagtcctgctacatgtcacaataatattatgaagcagaccatggtggattctagctgcaggatcctgacctcggacgtatttcaagactgtaacaaactggtagatcctgagccttatctcgacgtgtgtatatacgacacctgcagctgtgagtctatcggtgactgtgcatgcttctgtgatacaatcgccgcctacgcccatgtatgcgcccagcatggcaaagtcgtcacttggcggaccgcgactctgtgtcctcagtcctgcgaggagcggaacctgagggagaacgggtatgaatgtgagtggaggtacaattcatgcgctcctgcatgccaagtcacctgccaacatccagagcccctcgcctgtcccgtccaatgtgtggagggttgccatgctcattgccctcccggcaaaatcctcgatgagctgcttcagacctgcgtagacccggaagactgtcccgtgtgtgaagtggctggtagaagatttgcatctggaaaaaaggtgaccttaaaccctagcgacccggaacactgccaaatttgccactgcgatgttgtaaacttgacgtgtgaagcctgccaggaaccgggaggcttggttgtcccccccacagatgctcctgtgtctccaactaccttgtatgtagaagacatctccgagcctccactgcacgacttttactgttcgcgccttctggatctggtctttctgctcgatggcagctcccggctctccgaggctgagtttgaggtgctgaaggcatttgtggtcgacatgatggaaaggctgcggatcagccaaaagtgggtgagggtagcggtcgtagagtatcacgacggatcacacgcctatattggtctgaaggatcgtaaaaggccctctgagctgcgtcgcattgcctctcaggtgaagtacgccggatcgcaggtcgccagcacctctgaggtcctgaagtatacgctctttcagatcttctccaagattgacagacccgaggccagtcgtataactctattgctcatggcatcccaagagccacagagaatgagccggaactttgttagatacgtgcaggggctcaaaaagaagaaggtgatagtaattccagtgggaatcggcccccacgccaatctgaagcagatcagactgatcgagaagcaggcgccagaaaacaaagctttcgtcctgagctctgtggacgaactggagcagcagcgcgatgagatcgtgagttacctgtgtgatttggccccagaggcccctccccctacactgcctcctgatatggcccaggtaactgtgggccccggactgttgggtgtgtccaccctgggccccaagcggaatagtatggtgctagacgtggcttttgtgctggaaggatccgacaaaatcggagaagccgatttcaaccgctctaaagaatttatggaagaggtgattcagcgaatggatgttggccaagacagtattcatgtcaccgtcctgcagtacagttacatggtgaccgtggaatacccattttctgaggcacagtcgaaaggcgatattctgcagcgggttcgcgagatccgatatcagggcggaaatcgcactaataccggactagccctcaggtacctgagtgaccacagcttcctagttagccaaggcgacagagaacaggctcctaatctagtctacatggtgacaggcaacccagcatctgatgagatcaaacgcctgcccggggatatccaggtggtgcctatcggagtgggacccaatgctaatgttcaagagctggagcgtatcggatggccgaacgcgccaatcctgattcaggattttgaaactttgcccagggaagccccagatttagttctccaacgctgttgctctggggagggcttgcagatccccactctgtctccggcccctgattgctcacagccactggacgtaatactcttgctcgacggaagctccagcttccctgcttcctattttgacgagatgaagtcgttcgctaaagcctttatttcaaaggccaacattggcccaagactgactcaggtctctgtgctgcagtatggctccattactactattgacgtgccctggaatgtcgtccccgagaaggctcatcttttgtcgctggtggacgttatgcaaagggaggggggacccagccagataggggacgccctgggctttgccgtcagatacttgacaagcgaaatgcacggggcacggcccggagcatctaaagccgtagtgatcttggtcacagacgtatcagtggactctgttgacgctgcagcagatgcagcacggtcaaatagagtgacagtcttcccaattggcataggcgaccgatacgatgccgcgcagcttcggatcctggccggaccagccggcgatagcaatgttgttaagctgcaaaggatcgaagaccttcccactatggtcaccttaggcaattcgttcctgcacaaactgtgcagcggctttgtgcggatttgcatggacgaagatggcaatgaaaaacggcctggcgatgtctggactttgccagatcagtgtcacacagtgacatgccagccggacggacaaacactgctgaaaagccaccgcgtaaattgtgacagaggactgcggcccagttgccctaactcccagtccccggtcaaggtggaagaaacatgcggatgtcgctggacatgcccctgtgtgtgcactggcagttccacaagacacattgtgacattcgacgggcagaattttaagcttacgggtagctgctcatacgtcctctttcagaacaaggagcaggacctcgaggtgatacttcataacggggcatgttctcccggtgccagacagggatgtatgaagtccatcgaggtgaaacactctgctttgtccgttgagctgcacagcgatatggaagtgacagtgaatggcagactggttagcgtcccgtatgtcggggggaacatggaggtaaatgtgtatggcgccattatgcacgaggttaggtttaatcacctgggccatatattcacattcaccccgcagaacaatgagttccagctccagctcagccccaagaccttcgcttctaagacatacggtctatgtggtatttgtgacgagaatggagcaaacgacttcatgttgcgggatggaaccgtcaccactgattggaagacattggtacaagaatggaccgttcagcggccaggccagacatgtcagcccatcctagaggaacaatgcctagttcccgattctagtcactgtcaggtccttttgctaccacttttcgccgaatgtcacaaagtgttagcccctgctaccttttatgccatatgtcagcaggattcctgccaccaagagcaggtgtgtgaagtgattgcttcctatgcccatctatgtcgcacaaatggagtgtgcgtcgactggcgaacccccgatttttgcgctatgtcttgtccaccatcgctcgtatataatcattgtgagcatggatgccctcgacactgcgacgggaacgtcagctcatgcggcgatcaccctagtgaggggtgcttctgccccccagacaaggtaatgctggaggggtcttgtgtgcccgaggaagcttgtacgcaatgtataggggaggatggcgtccagcaccagtttctcgaagcatgggttcccgatcatcagccttgccagatatgcacgtgcttgtctggccgaaaggttaactgtactacacaaccctgccctacagcaaaggctcccacatgtgggctctgcgaagttgctcgattacggcagaatgctgaccagtgctgcccagagtatgagtgcgtgtgtgacccggtgtcatgtgatttaccccccgtgcctcattgtgaacgaggtcttcagcctaccctgaccaaccccggtgagtgtagacccaacttcacctgcgcatgtagaaaagaagagtgtaagcgggtgtccccccctagttgccctcctcaccgcctgccaacactgcgcaagacacaatgttgcgacgaatacgaatgcgcctgcaactgtgtaaattctacagtcagctgcccgctgggctacctggcgtccactgcaacaaacgactgcggctgcaccactacaacgtgtttgcctgacaaagtgtgcgttcacagatccaccatctatcctgttggtcagttttgggaggagggttgtgacgtgtgtacctgtacagacatggaggacgctgtgatgggcttgcgagtggctcaatgcagtcaaaaaccttgtgaggacagctgtcgctccggattcacctacgtgctgcacgagggcgagtgttgcggccgctgcctcccctcagcatgtgaagtagtcactggctcaccaaggggcgacagccagtcttcttggaagagtgttggctcacagtgggcatcgcctgagaacccctgtctcattaacgaatgcgttagagtcaaggaggaagtcttcattcagcagaggaatgtgtcttgtccccaactggaagtccctgtgtgcccaagtggttttcagttgagctgtaagacctcagcctgctgtccttcttgtcgctgcgaacgcatggaagcctgtatgctcaatggcaccgtgataggcccaggcaagaccgtcatgattgatgtgtgtaccacctgtagatgtatggtccaggtgggagtcatctcaggcttcaagttagaatgcaggaaaactacctgtaacccctgtcccctaggttataaggaagaaaacaacacgggagaatgctgcggccgttgtctccctacagcatgtacgatacagctgagggggggccagatcatgacactaaagcgcgacgagacgctacaggacggctgtgacacgcatttttgtaaggtgaacgagcgcggggaatatttttgggaaaaacgagtgacaggttgtcctcctttcgacgaacataagtgcctggcggagggcggaaaaataatgaaaattccggggacctgctgtgatacctgcgaagaaccagagtgcaacgatataactgcccgcctccagtatgtaaaggtgggctcttgcaagtccgaggttgaagtcgacatccactactgccaaggaaagtgcgcatccaaagccatgtacagtatcgatattaacgacgtccaggaccagtgcagctgttgctctccgacccgcaccgagcccatgcaagtcgctctccactgtacaaatggcagcgtggtgtaccacgaagtgctcaatgccatggagtgtaaatgctcccccagaaaatgttccaaa

SEQ ID NO: 21401 - DNA, 8439 bp, synthetic construct
  misc_feature 1..8439: note = source = /note="Description of Artificial Sequence: Synthetic coding sequence"
  source 1..8439: mol_type = other DNA
atgatccccgcaagattcgccggggtccttctcgcactcgcgctcattctgcccggcactctatgcgccgaggggacccgaggtcggtcgtcaaccgcccgttgttcgctctttggctccgattttgtaaatacgttcgacggcagcatgtattcctttgcaggctactgttcttaccttctcgctggcggctgccagaagcgtagtttcagtatcataggagatttccagaatgggaagcgcgtctccctttccgtgtatctcggcgaattcttcgacatccacctgtttgtaaacggtacagtgacccagggcgaccagcgagtttctatgccttatgcaagtaaagggttgtacttagagaccgaagccgggtactacaagctttccggggaggcttacggatttgtagccaggatcgatggctccggcaatttccaggttctactgagcgacaggtacttcaacaagacttgtgggttgtgtgggaattttaacatattcgccgaggatgacttcatgactcaggaggggaccctgacaagtgacccttatgacttcgcaaattcctgggcactgtcatccggagagcaatggtgtgagagagcatctccccctagctcatcttgtaatatatcgagtggggagatgcagaaaggattgtgggagcaatgccaactgctgaaatctaccagcgtgtttgccagatgccacccgctcgtagaccctgagccattcgtggccctgtgtgagaagactctctgcgaatgtgcaggcgggctcgagtgcgcctgccccgctttgctcgaatatgcacggacctgcgcccaggaaggcatggtgctgtacggctggacagaccactcggcctgttccccagtgtgcccagccggcatggagtacaggcagtgtgtaagtccttgcgcaaggacttgccaaagcctgcacattaacgagatgtgccaggagagatgtgtcgatggatgctcatgccccgagggtcaactgttggacgagggactctgtgttgaatctacggagtgtccatgcgtacacagcggaaaaaggtatccccccggcacttctctgagtagggattgtaatacttgcatctgccgaaattcccaatggatatgctctaacgaggaatgccctggtgagtgcctggttacgggccagagtcactttaaatctttcgataaccgttattttaccttctcggggatctgtcagtatctattagcacgagattgtcaggatcactccttcagtatagtaattgagacagtgcagtgcgctgacgatcgtgacgctgtatgtacccggtctgtcactgtcagactccctggccttcataatagcttagtgaagctcaagcacggcgccggggtagccatggacggccaagatgtgcagttgccccttctgaagggcgaccttcggatccagcacaccgtgactgccagcgtgcgtctgtcatatggagaagacttacagatggactgggacggacgtgggagactgctcgttaaattgtctcccgtctacgcaggaaagacatgcggcctctgtgggaactataatggaaatcagggcgacgactttttgacacctagcggcctggccgagccacgagttgaggactttgggaatgcctggaagctgcacggtgactgccaggatttgcaaaaacagcactctgatccctgcgctctgaatcctcggatgaccaggttctccgaagaggcatgtgctgtcctcacttcaccgacctttgaggcttgtcatagagctgtgtctccactcccttatctgaggaattgcagatatgacgtttgcagttgcagcgatggacgggagtgcctctgcggggccctggcttcctacgctgctgcctgcgccgggagaggcgtccgcgtggcgtggagagagccaggccgttgcgaactgaactgccctaaaggccaggtctaccttcaatgcgggacgccgtgcaacctgacttgtagatccctgtcttatcccgatgaggaatgcaatgaagcttgcttggaaggatgtttctgtcctcctggactgtatatggatgaaaggggcgattgtgtaccaaaggcccaatgcccttgttactacgacggagaaatttttcagccagaggatatcttctctgatcatcatactatgtgctattgtgaggacggattcatgcactgtacaatgtcaggagtgcctgggtccctgctgccagatgccgtcttatccagtcctctgtctcaccgtagcaaacgctccctatcctgcaggcctcccatggtaaagttggtctgtcccgcagataaccttcgagcagaaggtctcgagtgcacaaagacatgtcaaaactatgatttggaatgtatgagtatgggctgtgtaagtggctgtctctgcccacctggcatggtgagacacgagaaccgatgtgttgcattagagcggtgcccctgctttcaccagggcaaagagtatgcgccgggcgaaactgtgaagattggctgcaatacatgcgtatgccaggacaggaaatggaattgcacggatcatgtttgcgatgctacatgctcaactattggtatggcccattatttaaccttcgacggcttgaagtacttattcccgggggaatgtcagtacgttctggtgcaagattactgtggcagcaatccaggcacctttagaatccttgtggggaacaaaggatgcagtcatccatctgtgaaatgtaagaagcgcgtcacaatcctcgtcgagggtggcgaaatcgaacttttcgatggggaggtgaatgtcaagcgtccgatgaaagacgagacccacttcgaagtcgttgaatctggcagatacatcatccttctgctggggaaggctctatcagttgtgtgggatcgtcacctgtcaatctcagtggttctgaaacagacttaccaggagaaggtctgcggactgtgcggtaatttcgatggcatccagaacaacgatctcaccagcagtaatctccaagtggaggaggatcctgttgacttcggaaacagttggaaggtgagttctcagtgtgcagacactagaaaggtgcccctggattcttcccccgctacctgccacaacaatatcatgaagcaaaccatggtggacagctcttgtcggatcttaacttccgacgtgtttcaggattgtaataagctcgttgaccctgaaccttatctggacgtctgcatctatgatacctgcagctgcgaatctatcggggactgtgcttgtttttgtgacaccattgcggcctacgctcacgtatgcgctcagcacggcaaggtggtgacttggcgaactgctaccctatgtccacagagttgcgaggagcggaatctgagggaaaatgggtacgagtgtgaatggcggtacaattcttgtgcccctgcttgccaagtcacatgccagcatcccgagcctctggcctgccccgtgcagtgtgtcgagggctgccacgctcactgcccacccggtaagattcttgatgagctgctgcagacttgcgtcgaccctgaagactgtcctgtctgtgaagtcgcagggcgacggttcgcttccggaaaaaaagtgacacttaacccaagcgatcccgagcactgccaaatatgtcactgtgatgttgttaatctcacctgcgaggcctgtcaggaacctggtggactcgtggttccacccactgatgctcccgtatctcccacgactctgtacgtggaagacatcagcgagccgcccctccacgacttctattgctctagactgttagacctagtgtttctcctggacgggtcatcgcgactgtcagaggctgaatttgaggtgctgaaagcctttgtcgttgacatgatggagcggctgcgaatcagccagaaatgggtgcgggttgctgtggtggagtatcacgacggatctcatgcctatatcggcctcaaagatagaaaacggccgtcagagctgagaagaatcgctagtcaggtcaaatatgctgggagccaggtggcctctacctccgaggtgttgaaatacactctatttcagatcttcagcaaaatcgataggccagaggcgtcccgcattacactgttattgatggcttctcaggagccccagagaatgtccagaaatttcgttcgatatgtgcagggtctcaagaagaaaaaagtgatcgtgatccccgtgggcataggtccacacgcaaatcttaagcagattcgcctcattgagaaacaggctccggaaaataaagccttcgtcttgtccagcgtggacgagctggaacagcagagggatgagattgtgagctacttgtgcgacttggccccggaagcgcccccaccaaccctgccgccggacatggcacaggtgacggtgggtccgggattactgggcgtgtctaccttaggtcctaaaagaaactctatggtcctggacgttgccttcgtcttggagggatcggataaaattggggaggctgactttaatcgcagcaaggagttcatggaggaagtgatccagcgaatggatgtgggccaagactccatacacgtcaccgtgttgcaatacagctacatggtaaccgtggagtaccccttctcagaggctcaatccaaaggcgatattctgcaacgcgtgcgggagatcaggtaccagggtgggaaccgaacaaataccggacttgctctgagatacctgtctgaccatagctttctcgtttcccaaggcgatcgggaacaggctcctaacctggtgtacatggttacaggcaacccagccagcgatgagattaaacgcctccccggggatatccaggtggtgcccattggggttggccccaacgctaacgtccaggagttggagaggatagggtggcccaatgccccaattctgatccaggatttcgagaccttgccccgggaggctccggacctggtcctacagaggtgttgctccggcgagggactgcagatccccacactgtcccctgcaccagattgcagccagccattggacgtgatcctcctgctggacggtagttccagctttccggcctcttacttcgacgagatgaagtcttttgccaaggcctttatctcgaaagcaaacatcggtcctcggcttacgcaggtgtctgtgctgcaatatggctcaattaccactatcgatgtgccctggaacgtcgtgcccgagaaggcacatctgctatccctggtcgatgtcatgcagcgagaaggcggaccttcccagattggcgacgcgttaggcttcgcagtgcggtacttgacctctgaaatgcacggagctaggcccggggcgtcaaaggccgtcgtaatactggttactgacgtgagtgtcgacagcgtggatgccgctgcggatgctgcaaggtccaacagggtcactgtgtttcctatcgggatcggcgatcgctacgacgctgcgcagctgcggatcctggccgggccggccggcgatagcaatgttgttaaacttcaaagaatagaggacctcccgaccatggttaccctgggtaactcttttctgcataagctttgtagtggatttgtccgcatctgtatggacgaggacggcaacgaaaagcgtccaggtgacgtatggaccctaccagaccaatgccacactgtgacctgtcagcctgatgggcaaactctgttgaaatcccaccgggtcaactgcgaccggggccttagaccctcctgccctaattcgcaatcacccgtcaaggtggaagagacctgtggttgtagatggacatgcccctgtgtttgcaccggctcctcaactaggcatatcgtcacgtttgatggacagaattttaagctgaccggctcatgttcctacgtcttgttccagaacaaagagcaggacctggaagtaattctgcacaacggagcctgctctccaggggcgagacaaggatgtatgaaatccatcgaggtgaagcactccgccctgtccgtggagctgcactccgacatggaggttactgtcaatgggaggctcgtgagcgtgccctatgttggaggcaacatggaagtgaacgtttatggcgcaatcatgcacgaggtacgattcaaccatctgggccacattttcacttttacgcctcagaataacgagttccaactgcagctcagtcccaaaacatttgcgagcaagacttacggactgtgcggcatttgtgatgagaatggagcgaatgactttatgttgcgggatggcactgtgaccactgactggaaaacactggttcaggagtggaccgtccagcgccccggccaaacctgtcagcccatcctagaagagcagtgcttagtccccgattcatctcactgtcaggttctgctcctgccactgttcgcagagtgccacaaggtgctggcaccagcaacattttacgctatctgccagcaggatagctgtcaccaggaacaggtttgtgaagtgatcgcatcgtatgctcacctctgcaggacaaacggagtctgcgtagattggagaacaccagacttttgcgctatgtcctgcccacctagcctggtttacaaccactgtgagcatggctgcccaaggcactgcgatggcaacgtgagctcatgcggagatcaccctagcgaagggtgtttctgcccaccagataaggtgatgcttgagggtagctgcgtgcccgaggaggcatgtacacagtgtattggcgaggacggagttcagcatcagtttttggaagcgtgggtaccagaccaccagccctgccagatatgtacatgtttgtcaggaagaaaagtgaactgtactacacagccctgtcctacagccaaggcgccaacttgtgggttgtgcgaagtggcgcgcctgcgccagaatgcagaccaatgttgcccggagtatgagtgcgtttgcgatcctgtttcttgcgacttacctccagtaccacactgtgagaggggactccagcccaccctgactaacccaggcgaatgtagacctaattttacatgtgcgtgtcgtaaagaggaatgcaaaagagtgtctcctccctcatgccccccacaccgcctgccgactctgagaaagacacagtgttgtgatgagtacgagtgcgcttgcaattgtgtcaactctacagtctcttgccccctaggctacctcgctagtactgctacaaacgattgcggctgtacgactaccacatgcctgcccgataaggtgtgtgttcacagatcaacgatttatccagtggggcagttttgggaagaagggtgcgacgtctgcacgtgcaccgacatggaagacgccgtcatgggactgcgtgtggctcaatgtagccaaaagccctgcgaggattcttgtcggagcgggtttacatatgtgctgcacgaaggtgaatgttgcgggaggtgtttgccgtccgcttgcgaagttgtaacaggatcacctagaggggattcgcagtcctcttggaaatccgttggctcccagtgggcctcacccgagaatccgtgccttattaacgaatgcgtgcgcgtcaaggaggaggtgtttatccagcagcggaacgtgagttgcccacagctcgaggtccctgtgtgccctagcggttttcagttgtcttgtaaaaccagtgcatgttgcccatcgtgtaggtgcgaacggatggaggcatgtatgttgaatggtaccgttataggacccggaaagactgtgatgatagacgtgtgcacaacctgcagatgtatggtgcaagtgggagtaatcagtggatttaagctcgaatgcagaaaaactacctgtaacccctgtccgctgggctacaaggaagagaataacactggcgagtgttgtggaaggtgcctgccaaccgcttgcaccatacagctgaggggtggccaaatcatgacactcaaaagggacgaaactttacaggatggatgcgacacccatttctgtaaagtcaatgaacgcggagagtacttttgggagaagcgcgtaaccgggtgtcccccgttcgatgaacacaaatgcctggcagaaggcggtaagatcatgaaaatccctggtacatgttgtgatacatgtgaagaacctgaatgtaacgacattactgctcgactgcagtatgtaaaagtcggatcatgcaaaagcgaagtagaggtggatattcattactgtcaagggaagtgcgcatccaaggccatgtacagtatcgatattaacgatgtgcaggaccagtgctcttgctgctcacccacccgcacagaacccatgcaggtggctttgcactgcactaacggaagtgttgtataccacgaagttcttaacgccatggaatgtaagtgctcaccacgaaaatgttccaaa

SEQ ID NO: 21402 - DNA, 8439 bp, synthetic construct
  misc_feature 1..8439: note = source = /note="Description of Artificial Sequence: Synthetic coding sequence"
  source 1..8439: mol_type = other DNA
atgattcctgccaggttcgccggggtgctacttgctctcgcgctgatcctacccggtacactatgtgccgaaggcactcgcggtcgttcgagtaccgctaggtgtagtctgtttgggtcagattttgtaaatacctttgacggaagcatgtacagcttcgcagggtactgttcctatttattggccggaggatgccagaagcggagcttctccatcataggagatttccagaacgggaagcgcgtgagcttaagcgtgtatctaggcgagttttttgatatccacctcttcgtgaatggaacggtgacgcagggggatcagcgtgtatcaatgccatatgcctcgaagggtctgtaccttgagacagaagccggttattacaaactgtccggcgaggcctacggcttcgttgcgcggatcgacggatcgggcaactttcaggtgttgctcagcgataggtatttcaacaaaacctgtggcctgtgtggcaacttcaatatcttcgcagaagacgacttcatgacccaggaaggaacattgaccagcgatccctacgattttgccaactcctgggctttgtcatccggagaacagtggtgcgagcgcgcctcaccaccaagttcatcctgtaacatctcatctggcgaaatgcaaaaaggtctgtgggaacagtgccaactgttaaaaagcaccagcgtgtttgctcgctgccaccctttggtggacccagaaccctttgtggccctgtgtgagaagacgctttgtgagtgtgcaggcgggctggagtgtgcctgccctgcgttgctggaatatgcccgcacgtgcgctcaagagggaatggtcctgtacggttggacagaccacagtgcctgttctccagtgtgtcctgcaggaatggagtatcggcagtgcgtgagcccttgcgcccggacttgccaaagcttgcatattaatgagatgtgtcaagaacggtgtgtcgatggatgttcctgccccgaggggcagttgttggatgagggcttatgcgtggagagtactgagtgtccgtgtgtgcactccggtaagaggtatcctcccgggacatcattgtcacgagactgtaacacctgtatttgtagaaactcccagtggatttgcagcaacgaggagtgcccaggcgagtgcctggtaaccggccagtctcactttaaaagcttcgacaatcgctactttacattttctggaatatgccagtacctgttggccagagactgccaggaccatagttttagcatcgtgatagagacggtgcagtgtgcagatgatcgggatgccgtgtgcacccgctctgtgacggtcaggttgcctgggctgcataactctcttgtgaaattgaagcacggagctggagttgcaatggatggtcaggacgttcagctgcctcttctcaagggtgatctgaggattcagcacacagtgaccgcctctgtcagactgtcatacggcgaagatctccagatggattgggacgggcgcgggaggctgttagtcaaactcagtcctgtgtacgctggcaaaacttgcggcttatgcggaaattacaatggcaaccagggagatgatttcctgacaccctcaggcctagccgaaccccgcgtggaggattttggcaatgcttggaagctccacggggactgccaggatctgcaaaaacaacattcggacccgtgcgccctcaatcctcgcatgacgagattctccgaggaggcctgcgccgtgctaacctccccaacttttgaagcttgccatagggccgtttccccactgccatacctgcgcaactgccggtacgacgtgtgctcttgtagcgatggcagggagtgtctgtgtggagccctggcaagctacgctgccgcttgtgcaggtcgcggggtgcgggtggcttggagagagccagggcggtgtgagctgaactgccctaaagggcaggtctatcttcaatgcggtaccccatgtaacttaacctgtaggtcgctgagttatccggatgaggagtgtaacgaagcttgtctggagggttgcttctgtccgccagggctgtacatggacgagcggggggattgtgttcctaaagctcaatgtccctgctattacgacggagagattttccagcctgaggatatcttctctgatcaccacaccatgtgttattgcgaagacggctttatgcactgtacgatgtctggggtgcctggatccttactgcccgatgccgtcctttccagccctctatcacatagaagcaaacggtccctgagctgccggccaccaatggtgaaattggtctgcccagctgataatctgcgggcggaaggactggagtgcacgaagacatgccagaattacgacctggagtgtatgagtatgggctgtgtgagcgggtgtctctgtcctcccggcatggtgcgacacgaaaatcgatgtgttgcactggagagatgtccctgctttcatcagggcaaggaatatgcccctggggaaactgttaagatagggtgtaatacatgcgtgtgtcaagaccgcaaatggaactgtacagatcacgtatgcgacgcaacctgttccactatcgggatggcgcactatctgacgttcgacggtctgaaatatcttttcccgggggaatgccagtacgtgctggttcaggactactgtggaagtaacccagggacattcagaattctggtgggcaacaaaggttgctcccacccatccgtgaagtgcaagaaacgggtgacgattctggtggaggggggggagattgagcttttcgatggagaggtgaatgtgaagcggcctatgaaagacgagacccactttgaagtggttgaatctgggaggtatattatcctgcttctgggaaaagccctctcagtcgtatgggaccgccatctgagtattagtgttgtcctcaagcagacttaccaggagaaggtctgcgggttatgcgggaacttcgacggaatacagaataacgacttgacaagcagtaatcttcaagtcgaggaggatcccgtggacttcggtaattcttggaaggtcagtagccagtgcgccgatacacgcaaagtgcctctggatagctctcccgccacatgtcacaataacatcatgaagcaaaccatggtggatagcagctgtcgtatcttaacctccgatgtgttccaggactgtaataaactggtggatccagagccatacctcgacgtgtgcatctacgatacctgctcatgcgagtctatcggcgactgtgcatgtttttgtgacaccattgcagcctatgcccacgtttgtgcacagcacggtaaggtcgtaacttggcgcactgcgacactgtgtcctcagtcctgcgaagaacgtaacctgagagagaacgggtacgagtgcgagtggcgctacaactcatgcgcaccggcttgtcaggtcacctgtcagcacccggagccgctggcttgcccggttcaatgtgtggagggctgccatgcacattgcccccccggtaaaatactggacgaattgctacagacttgcgtcgaccctgaagactgtccagtgtgtgaggttgccggtaggcggttcgcgagtggaaagaaggtcactctgaaccctagcgacccggagcactgccagatctgtcattgtgatgtagtgaatctaacatgcgaggcctgtcaggaacctggcggcctcgtcgtcccacccactgacgcaccagtcagtccaacaactttgtacgtcgaggatattagcgagccgccattgcacgatttttactgttcccggctcctggatttggtgtttctgctggacggttcctctcgcttgtccgaagctgagtttgaggtcctgaaggcctttgtcgtcgacatgatggaacgcttgcgcatctcacagaagtgggtgagggtggccgtggttgagtatcacgatgggtcacatgcctatatcggtctgaaggataggaagcgtccatcagagctgaggaggattgcttcacaggtgaaatacgcaggcagtcaggtggcgtctactagtgaagttctgaaatacacattattccaaatcttttctaagatcgatcggcctgaagcctcccggataacactgctcctaatggcatcacaggagcctcagaggatgtctcggaactttgttcgatatgttcaaggcctaaagaagaaaaaggttatcgtgattcctgtcggtataggcccacatgcaaacctcaagcaaatccgcctaattgagaaacaagctccagagaacaaagccttcgtcctctctagtgtggatgagctggaacaacaacgagacgagatagtaagctacctatgcgatctagccccagaagctccccctccaaccctaccaccagatatggcacaggtgaccgttggaccaggtctgctgggagtgtccacgcttggtcccaagcggaactccatggtcttggacgtggcgtttgtgcttgaaggttctgataaaattggggaagccgatttcaatcgatcaaaggagtttatggaggaggttattcagagaatggatgttgggcaggattccatccacgtaacagttcttcagtactcctatatggtgacagtcgagtacccattcagcgaggcacaaagcaagggtgatatcttacaacgggtcagggaaattcgataccagggagggaatcgaaccaacaccggactggccctgagatatttatctgatcattccttcctggtgtctcagggcgaccgggagcaggcgccaaacctggtgtacatggtgacgggtaaccccgcatctgatgagataaaaagactgcccggcgacatccaagtggtgcccataggggtggggccaaacgccaacgtccaggagctggagcgtatcggctggccaaacgcacctatcctgatccaggattttgaaaccctgccacgtgaagctccggacctggtgttacagcggtgttgcagtggtgaaggcctgcagattcctacgctctcacctgccccagactgctcacagcccctcgatgtcattctgctgcttgatggctctagttccttccctgccagctattttgatgaaatgaagtcatttgccaaagcgtttattagtaaggctaatatcgggcctaggttgacccaggtgtccgtgcttcagtatggttcaatcaccactatcgacgtgccctggaatgtggtgcccgaaaaggcccatcttttatcactggtcgacgtgatgcaacgagaagggggtccttctcagatcggcgacgcgctgggtttcgctgttcgatacctgacctccgaaatgcatggagcacgtccaggcgcaagcaaagcagtggtcatcctggtgaccgacgtgtctgtggacagtgtcgacgcagccgctgatgccgcccggtccaatcgggttactgttttcccaatcggcattggggaccgctacgatgctgcgcagttgcggatcctggccggaccagcaggggattctaacgttgtaaagctgcaaagaatcgaagacctgcccaccatggtgacgcttggcaacagctttctccataaactatgttcaggtttcgtgcgaatctgtatggacgaagacggtaatgagaagcgaccaggcgacgtgtggaccctgcccgaccagtgccacactgtgacgtgccagcctgacggacagacacttctcaaaagtcacagggtgaactgcgacagagggctacgtccttcatgccccaactctcagtctcccgtgaaggtggaggagacgtgcggatgcaggtggacatgcccatgtgtctgtacaggctcctcaacacggcacatcgtgacttttgatgggcagaactttaaattgactgggtcctgctcatatgttctgttccagaacaaggagcaggatctggaagtcattctccacaacggggcatgttctcccggcgcccgccagggatgcatgaagagtattgaggtcaagcatagcgcgctctccgtcgaactccacagtgatatggaagtgacagttaacggccggctcgtgtccgtcccatacgtcgggggaaacatggaggtgaacgtatatggcgccatcatgcacgaagtccggtttaaccacctgggtcacatttttacttttacgcctcagaacaacgagttccagctgcagctgtcaccaaagacttttgcatcaaaaacatacggtctctgcggtatatgcgatgagaacggcgctaacgatttcatgttgcgggacggaacagtcaccacggattggaagaccctggtgcaggagtggacagtccagcggcccggacagacatgtcagcccatactggaggagcagtgcctcgtacccgatagtagccattgccaggtgctgttgctgcctctgttcgcagaatgtcataaagtccttgcgccggccacattttatgctatatgtcaacaggattcttgtcaccaggagcaggtatgtgaggttatagcaagttacgcccacctctgcaggaccaatggagtatgcgttgactggaggacgcctgatttctgcgccatgtcctgtccgccaagtctcgtttataatcactgtgagcacggttgcccacgtcactgcgacgggaatgtttcatcttgcggggatcaccctagcgagggttgcttctgcccccccgataaagtcatgcttgaaggctcgtgtgtccctgaagaagcatgcacccagtgcatcggggaggatggcgtgcagcatcaattcctggaagcatgggtgcccgaccaccagccctgccagatatgtacatgcctgtcaggaaggaaggtgaattgcaccacccagccctgcccaacggccaaagcgcccacgtgtggtctctgcgaagttgcacgcctacggcaaaacgccgatcagtgctgccccgagtatgagtgtgtatgtgatccagtgtcatgcgacctccccccagtgccgcattgtgagcggggtctgcaacccacgctcaccaaccctggagagtgcaggcccaattttacatgtgcttgtcggaaagaggagtgtaagagagtgtcaccacctagctgcccaccacacaggctcccaacactgcggaaaacccaatgctgcgacgaatatgaatgtgcatgcaactgtgtcaactccaccgtcagctgtcccttaggataccttgccagtaccgcaaccaacgactgtgggtgcaccaccactacatgtctgccagataaagtatgtgtgcatcggagtaccatttatccggtcggacagttctgggaggagggttgcgacgtatgcacatgtaccgatatggaagacgcagtaatgggcctgcgagtggcccagtgctctcagaaaccctgtgaggatagctgcaggtcaggcttcacctatgttcttcacgaaggggagtgctgcgggcgctgccttcccagtgcatgcgaagtcgtcactggatctccaagaggggactcacaaagctcttggaagtccgttgggtcccaatgggcctccccggagaacccctgtctcatcaacgagtgtgtgcgggtaaaggaagaggtgttcatccaacagcgcaacgtgagctgtccgcagctggaggttcctgtctgtccaagcggcttccagctgtcttgtaagacttccgcgtgctgtccatcctgcaggtgtgaacgcatggaggcatgcatgttaaacggcaccgtgataggccctggaaaaaccgtgatgatcgacgtgtgcacaacttgtaggtgcatggtacaggtgggtgtcatcagcggctttaaactggagtgtcggaagacaacttgtaacccttgtcccctgggttacaaggaagagaacaacaccggtgaatgctgcgggagatgcctgcccacagcgtgtaccatccaactgcgaggaggtcagatcatgacactgaaacgggatgagacgctccaggacgggtgtgatacacatttttgcaaagttaatgagaggggagaatacttctgggaaaagagggtcaccggctgccctcctttcgacgaacataaatgcttggccgagggcggcaagatcatgaagattccaggaacgtgttgtgatacctgtgaggaacctgaatgtaacgacatcacagcacgactgcagtacgttaaagtcggttcttgcaaatccgaggtggaagtagacatccattactgccagggaaagtgtgcaagcaaagccatgtactccatcgatatcaacgacgtgcaggatcaatgctcatgttgcagtcccacgcggactgagccaatgcaagttgcactgcactgtaccaacggaagcgtagtgtatcacgaggttctgaacgctatggagtgtaagtgttccccccgcaaatgtagcaag

SEQ ID NO: 21403 - DNA, 8439 bp, synthetic construct
  misc_feature 1..8439: note = source = /note="Description of Artificial Sequence: Synthetic coding sequence"
  source 1..8439: mol_type = other DNA
atgatccccgcacgattcgcgggcgtcctgctggctctggcattaatcctgccaggaaccctgtgcgccgagggcacaagaggtcggtcctcaaccgcacgctgttcactgtttggaagtgattttgtgaacactttcgacgggtcaatgtatagcttcgctggttattgctcctatctgctggctggagggtgtcagaagagatctttctccattatcggagattttcagaacggcaaacgtgttagtttgtcggtatatctgggggagttctttgatattcacttgttcgtgaacggaaccgttactcagggcgaccagcgggttagcatgccctatgccagtaaaggcttgtatctcgaaaccgaggctggatactataaattgtccggagaagcgtatggcttcgttgcaaggatcgacgggagtggcaattttcaggtcctgctgagtgaccgctactttaataagacatgcggactctgcggtaactttaacatcttcgccgaagacgacttcatgacccaagagggcaccctgaccagcgacccttacgattttgcaaactcctgggccctgtcttccggagagcagtggtgtgaacgggcaagcccgccgtcaagttcctgcaacatatcctctggagagatgcaaaagggactttgggaacagtgccagctactgaaaagcactagcgtgtttgcaagatgtcatccacttgtggatcccgagccttttgtagccctgtgcgaaaagacactttgtgaatgcgcggggggtctggagtgcgcctgcccggccctcctcgaatacgccaggacatgcgctcaggaggggatggtgctctatggttggaccgatcatagcgcttgtagtcccgtctgccccgcaggcatggagtatagacagtgcgtgtctccatgtgcccggacatgccagtcactgcatataaatgagatgtgccaggagcgttgtgttgatggttgttcatgtcccgagggccagctgctggacgaggggttgtgtgtggaatccacagagtgtccatgcgtccacagcggaaagagatacccccctggaacttccctgtcacgggactgcaatacgtgtatctgccgcaactcacagtggatctgcagtaacgaagagtgccccggagaatgtctggtcacaggccaatctcattttaagtcattcgataaccggtatttcacgtttagtggaatctgtcaatacttattggcccgagactgtcaggaccacagcttctcaatcgtaatcgagactgtgcagtgcgcggatgatagggacgcggtatgtaccaggagtgttacagttagacttccggggctgcacaactctctggtgaagctgaaacatggagctggggtcgccatggacggacaagacgttcagctacccctcctaaagggggaccttagaatccagcatacagttaccgcaagtgtccgcctttcttatggggaggatttgcaaatggattgggatggaaggggaaggctgctcgtgaaactgagccccgtgtacgcggggaaaacatgcggtctatgcggcaactataatgggaaccaaggtgacgattttctcacgccaagcgggctggctgaaccgcgcgtcgaggattttggcaacgcttggaaactgcacggcgattgtcaggatctccagaagcaacattccgacccatgtgctttgaatccgcgtatgaccaggttctcagaagaagcctgtgccgtccttacgtctcctaccttcgaggcatgtcatcgggcggtgtccccactcccgtacctacgcaactgccgttacgatgtgtgctcttgctcagatggaagagaatgcctgtgcggagccctggctagttatgccgccgcatgcgctggacggggcgtgagggtggcgtggcgggagccggggaggtgtgaactgaattgccctaaaggccaagtttatctgcagtgcgggacgccttgcaacctcacctgtcgaagcctgagctaccccgacgaagagtgtaacgaagcctgtctggaaggctgcttctgcccacctggtctgtacatggatgaacgcggggattgtgttccaaaggctcagtgcccttgctactatgacggtgagatattccagcctgaggatattttttctgaccatcacacaatgtgctattgcgaagacggttttatgcattgtacgatgtctggcgtgccagggagtttacttccagacgctgtactctccagtccgctttcccacagatctaagcgtagcctgagttgtcgccctcctatggtaaaactggtgtgtcctgctgataacctgagggcagaagggcttgagtgcaccaaaacatgccaaaattatgatcttgagtgtatgtctatgggctgtgtgtcgggatgtctatgtccaccgggaatggtgcgtcacgagaacagatgcgtcgctctggaacgctgcccttgttttcaccagggaaaagaatatgctccgggagagacagtcaaaattggctgcaatacttgtgtgtgccaggaccgaaaatggaattgtacggatcatgtctgcgatgccacctgtagtactatcggcatggcccattatttgacttttgatggattgaaatacctgtttcccggcgaatgccaatatgtcctcgtgcaggattactgtgggagtaacccaggcacgtttagaattctagtggggaataagggctgttctcacccctccgttaagtgcaaaaaaagggtgacaattttggtcgagggaggcgagatcgagttatttgatggagaggtaaatgtgaaacgacctatgaaggatgaaactcactttgaggtggtcgagagcgggagatatataatcctattactcgggaaagccctgagtgtggtgtgggaccgccatctgtcaatatcggtggttttgaagcaaacttaccaggaaaaagtgtgtggcctctgcggcaacttcgatgggattcagaataatgacctgacttcttccaacctgcaggttgaagaggatccggtggatttcgggaacagctggaaggtgtcatctcagtgcgccgacacccggaaggtgcccttggactcttcaccagccacatgtcataacaatatcatgaagcaaactatggtagacagttcttgccggatattaacctccgacgtctttcaggactgcaataagcttgtagacccagagccgtacctcgacgtttgcatctacgacacttgttcttgtgaaagcattggtgactgcgcctgcttctgcgacaccatcgcagcgtacgcacacgtctgcgcacagcacggaaaggtggtaacttggcgcactgcaactttgtgcccccagtcctgcgaggagaggaatctgcgagagaacggctacgaatgcgagtggcggtataactcttgtgcccctgcttgtcaggtaacttgccagcaccctgagcctttggcctgtcccgtgcagtgtgtggagggttgccatgcccattgtccaccaggcaaaatcctggatgagctgcttcagacttgcgtcgaccctgaggactgcccagtgtgtgaagttgccggacggagatttgcgtctggtaagaaggtcacgcttaaccctagcgaccccgagcactgccagatttgtcattgcgacgttgtgaacctcacttgtgaggcgtgtcaagaacccgggggactcgtcgttccaccaacagacgctcccgtgtcacctaccacgctgtacgtcgaggatatcagtgaaccgcctcttcatgacttctattgctcccgtctcctggacttggtgttcctcctggacggctcatccaggctttccgaagccgagtttgaagtgctaaaggctttcgtagttgacatgatggagcgcctacgcatctcacagaagtgggtgcgcgttgccgtagtggagtaccatgacgggagtcacgcctacattggattgaaggaccgtaagagacccagcgagctacgccggattgcctctcaggttaaatatgcagggtcacaggtcgcgagcacttctgaggtgctcaaatacaccttgtttcagattttctctaaaattgatcgccctgaagcttcacgaataactctcctactcatggcaagtcaggagccacagaggatgagtcgcaactttgtaaggtacgtacaggggttaaagaaaaaaaaagtcattgtgatccccgtggggattggtccacacgcgaatttaaaacagattcgccttattgagaaacaggcccccgaaaataaagcctttgtgctgtcctctgtggatgaattggagcagcaacgggacgaaatcgtctcatacctgtgtgacctggctcctgaggcccccccccccactcttccacctgacatggcccaggtcaccgtcggcccaggactcctgggagtatccacactgggccccaagcgaaactctatggttctggatgttgcgtttgttctcgaagggagtgacaagataggagaggccgactttaaccgaagcaaggaatttatggaggaagtgatccagcgcatggatgtcggccaggactcaatacacgtaacagtgcttcagtacagctatatggttacagtggaataccctttctcagaagctcaatctaagggtgacattctccagcgggtcagagagatccgctatcagggtggtaacagaacgaacaccggacttgccctcaggtacctttcggaccatagttttctagtttctcagggcgaccgcgaacaagctcctaatctcgtctacatggtgaccggaaatcctgcatctgatgagatcaaaagacttcctggcgacattcaggttgtacccattggggtcggcccaaatgcaaatgtgcaggagttggaacgaataggttggcccaatgccccgatcctgatacaagacttcgaaaccttgccaagggaggcacctgatttggtcttacagcggtgctgctctggggaaggcctccagattcccaccctctcccctgcacctgactgttcacagccactcgatgtgatcttgctgctcgacggctcaagtagtttcccggcgagctactttgatgagatgaagagcttcgccaaagcctttatcagcaaggccaacattggaccgcgcctgacgcaggtaagtgtgctgcagtacgggtcaattaccactatcgacgtgccctggaacgtggtcccagagaaagctcatctgctgagtctagtggatgtaatgcaacgggaagggggtcctagccaaattggcgacgcacttggcttcgccgtacgatacttgacctccgagatgcatggggcacgaccaggggcgagtaaagccgtcgtgattctggtgacggacgtaagtgtcgatagtgtggacgcagcagctgatgctgcaagatctaatagggtcaccgtctttccaattgggatcggagatcgctatgacgcggcccagttaaggatcctggcgggccctgccggggattccaacgttgtcaagttacagagaatagaagaccttcctaccatggtgacgctcggcaactctttccttcataagctgtgctcaggttttgtacgtatttgtatggacgaagacgggaacgaaaagaggccgggggatgtgtggacgctgcccgaccagtgtcatactgtaacctgtcaaccagacgggcagacattactaaagtcccaccgggtaaattgtgatcgaggacttagaccaagttgtcctaatagccaatcacccgtgaaagtcgaagagacctgtggatgcaggtggacttgtccctgtgtttgtaccggctcctcaacacgccatattgtgacattcgacggtcaaaattttaagctgacaggttcttgttcatacgttttatttcagaacaaagagcaggacctggaggtgattttacacaacggcgcttgtagtccgggcgccaggcaaggctgtatgaaatcaatcgaggtgaaacacagcgcactgtccgtggagctgcatagcgacatggaggtaactgttaacggaagactggtctccgtgccgtacgttggcggaaatatggaggtcaatgtgtatggcgccattatgcatgaggtgcgattcaaccatctcggccacatattcacatttacaccgcaaaataatgaatttcagctgcaactttcccccaagacttttgcatctaagacatatggcctgtgcgggatatgcgatgagaacggagcgaatgatttcatgctccgagacggaaccgtcaccacagattggaagaccctagtgcaggaatggacagtccagagacccgggcagacctgccagccaatcttggaggagcaatgtctggtccccgacagttctcactgtcaggtccttctgttgcctctcttcgcagagtgccataaggtactggccccagcaacattctacgccatttgccagcaggactcgtgtcaccaagagcaggtgtgtgaggttatcgcctcttacgctcacctatgccgcacaaacggagtctgtgtggactggagaacacccgatttttgcgcaatgtcttgcccaccttcactcgtttataatcactgtgagcacggttgcccccggcattgcgacggaaatgtgtctagctgtggagaccacccctctgaggggtgtttttgcccgcctgataaggttatgctggaaggcagttgcgtgccggaagaggcctgcacccagtgcatcggcgaggatggggttcaacaccagttcctcgaagcatgggtgccagaccatcaaccatgccaaatctgtacatgtctgtccggcaggaaagtcaattgcactacccagccatgccccactgctaaagctcccacttgcgggctgtgcgaagtcgcacggctgagacagaacgccgatcagtgctgtccggagtatgagtgtgtctgtgatcccgtctcctgtgacctcccgcccgtgccccactgtgagcgcggtttgcagccaaccctgacaaaccctggcgaatgtagacctaactttacatgcgcgtgcagaaaagaagaatgcaaacgcgtcagccctccgtcttgtccacctcatcggctgcccacgttgcggaagacacagtgctgcgatgagtatgaatgcgcgtgcaattgtgtcaatagcaccgtttcgtgcccactgggatatttggcctcaaccgctacgaacgattgtggctgtacaaccactacttgcctgccagacaaggtttgcgtgcataggagcaccatatatcccgtgggacagttctgggaagagggttgcgacgtatgcacctgcactgacatggaggatgctgtgatgggcctgcgtgtcgctcagtgcagccagaagccctgcgaggactcatgtaggtccggatttacgtacgttctccacgagggagagtgttgtggtaggtgccttccttccgcctgcgaggtggtcacaggttcgccgcgcggggactctcagtcttcttggaaaagcgtgggcagtcagtgggctagccctgagaatccttgtcttattaatgagtgtgtgcgggttaaggaagaagtattcatacaacagagaaatgtgtcctgcccccagctggaagtgcctgtttgcccctcaggcttccagttgtcatgcaaaacctcagcctgctgccctagttgccgatgcgagcggatggaggcgtgtatgcttaatggtacagtgatcggccctggtaaaactgtgatgattgacgtgtgtacaacgtgtagatgcatggtccaagtgggcgtgatatcaggctttaagctggaatgtaggaagaccacttgtaatccctgtccccttggctataaggaggaaaataacaccggcgagtgctgcggaaggtgtctgccaacggcgtgtactattcaacttaggggggggcagatcatgaccttgaagagggacgaaacactccaggacggctgtgacacccacttttgcaaggtgaacgagcggggcgagtacttttgggaaaagcgagtgactggttgtcctccctttgatgagcacaaatgtctggcagagggtggcaagatcatgaaaatcccaggcacatgctgcgacacctgcgaagagccagaatgcaacgacattactgcacggctgcagtatgtcaaagttggaagttgtaagagcgaggttgaagtggacatccactactgtcagggcaaatgcgcatccaaggccatgtactctattgacatcaacgacgtgcaggatcagtgttcttgttgcagccccacgcgtacagagcccatgcaggttgctctgcactgtaccaacggttcagtcgtctaccacgaggtgttgaatgccatggagtgcaagtgctcgcccagaaaatgctccaag

SEQ ID NO: 21404 - DNA, 8439 bp, synthetic construct
  misc_feature 1..8439: note = source = /note="Description of Artificial Sequence: Synthetic coding sequence"
  source 1..8439: mol_type = other DNA
atgattccagcaaggtttgccggcgtactgctcgcactagctctgatcctaccgggcacactgtgtgccgagggaactcgagggcggtcaagcaccgccagatgctcactgttcggaagtgacttcgtgaacacatttgacgggagcatgtacagtttcgcaggctattgctcctatctgttggccggtgggtgccagaagaggtcattctcaatcataggagacttccagaacgggaagcgggtatctttatcagtatacctgggcgaattttttgacatccatctgttcgtgaatgggaccgtcacccagggggatcagagggtgtcgatgccttatgcgtcgaagggcctgtaccttgaaaccgaagctggatactacaagctgtccggagaagcttacggattcgtggcacggatcgacggtagtggtaatttccaggtgctgctgagcgaccggtattttaataagacctgtggcctctgtggcaactttaacatattcgctgaggacgatttcatgacccaggagggaacgttaacctcggatccttatgatttcgccaactcctgggccctgagcagtggagagcagtggtgtgaaagggcttctccaccgagctcgtcatgcaacatctctagcggcgagatgcagaaggggctgtgggagcagtgccagcttctgaagagcacgtcagtgttcgcacgatgccatcccctggtggacccagagccgtttgtcgcgctgtgcgagaaaacgctgtgcgagtgtgccggaggcttggaatgcgcctgccccgctttacttgagtatgctagaacctgcgcccaggaggggatggtgctgtacgggtggacggatcattctgcctgctcacctgtgtgccctgcgggcatggaatatcggcagtgcgtttcaccatgtgcaaggacttgtcagtccctgcacataaacgagatgtgtcaagaaagatgtgtagatggttgttcatgtccagagggccagcttctcgacgaggggttgtgtgtggagtctactgagtgtccttgcgtacactccgggaaacgttaccctcccggaactagcctcagcagagactgtaatacctgtatttgtaggaacagccagtggatttgctcaaatgaagaatgcccgggagagtgccttgttacaggacaaagtcatttcaaatcctttgataaccggtactttactttcagtgggatctgtcagtatttgctcgctcgtgactgccaggaccactccttttctatagtgattgaaaccgttcaatgtgctgacgatcgagacgctgtgtgtaccagatccgtaaccgtgaggctgcctggactccacaactctctggtgaaactaaagcacggcgccggcgttgctatggacggtcaggatgttcagctcccattgcttaaaggggatctgcgaatacagcacacagtgacagcctcggtacgcctgagttatggcgaggacttacagatggactgggacggccgggggaggctgttggtgaagttgtcgcccgtatacgccggaaaaacctgcggcctgtgtgggaactacaacggcaaccagggagatgatttcctgacaccctcaggactggcagaacccagggtcgaagatttcggcaacgcatggaaactgcacggcgactgtcaggatctccagaagcagcacagtgatccatgcgctctgaacccccgcatgacaaggtttagcgaagaagcctgcgcagtgctgacttcacctacctttgaggcttgccacagagcagtttcccccctgccctaccttcgaaattgccgttatgacgtgtgctcatgttccgatgggcgcgaatgcttatgcggagccttggcaagctatgcagccgcatgtgcaggaagaggtgtgcgcgtggcatggcgcgaacccggaaggtgcgaactaaactgtccaaaggggcaggtttacttgcaatgcggcactccctgcaacctgacatgcagatctcttagctaccctgacgaggagtgcaatgaggcctgtttggaggggtgcttctgcccgccaggtctctacatggacgaacgcggggattgcgtcccgaaggctcagtgcccctgttactatgatggagaaatctttcagcccgaggacatttttagcgatcaccacaccatgtgctattgtgaggatggcttcatgcattgtacgatgtcgggagtgccagggtcactgttgcccgatgctgtgttaagctctcctttatctcaccggtcgaaacgatccctaagttgtcgccccccaatggtgaaactcgtctgccccgccgataaccttcgagcggaaggccttgagtgcacgaagacgtgccaaaactatgacctggaatgtatgagtatggggtgcgtttcaggctgtttatgcccgcccggcatggttcgccatgagaacagatgcgtggcactagagcgctgcccctgcttccaccaggggaaggaatacgcccccggagaaaccgtaaaaattggctgcaatacctgcgtttgtcaggacagaaagtggaattgtactgatcacgtctgcgacgccacctgtagcactatcggcatggctcattacctgaccttcgacgggctcaagtatttattccccggagaatgtcagtatgtgctagtgcaggattattgcggttccaatccaggtaccttcagaatcctggtcggcaacaaaggatgcagccatccatccgttaagtgcaagaagcgggttaccatcttggtggagggtggcgagatagaactgtttgacggcgaggtgaatgtgaaacggccaatgaaggacgaaacacatttcgaggtggtggaaagcggccggtatataatattgctgctggggaaagctctgagtgtcgtatgggacagacacctgtccataagtgtggttctcaagcagacctatcaggagaaggtgtgcggtttatgcggtaattttgacgggattcaaaacaatgatttgacaagcagcaaccttcaggtggaggaagaccctgtcgatttcgggaatagctggaaagtcagcagccaatgtgccgatacgcgtaaggtgcctcttgattcaagtcccgccacctgtcataataacatcatgaaacagaccatggtcgattcatcatgcaggattctcacaagtgatgtgttccaggattgtaataagctggtagaccccgaaccgtatctagatgtgtgcatttacgatacctgcagttgtgagtctattggggactgcgcttgcttttgcgatactattgctgcgtacgctcacgtgtgtgcgcaacatggtaaagtagtaacttggcgcactgcgaccctgtgccctcagagctgcgaggaacggaacctacgagagaatgggtatgagtgtgaatggagatacaactcatgcgcccctgcttgtcaggtgacatgtcagcatccggaacccttagcatgccccgttcagtgtgtggagggctgtcatgcacattgcccacctggtaagatcttagacgagctgctgcagacttgtgtggacccggaggattgtccggtctgtgaagtagctggacgcaggtttgcgagtgggaagaaggtcaccctgaacccttctgatcccgagcattgtcaaatctgtcactgcgacgtagttaacttgacatgcgaagcatgtcaggaacctggagggctggtggtcccccctactgatgccccagtgtcacctaccaccctttacgtagaagacattagcgaaccccccctgcatgacttttattgttcccggttactagacctcgttttcctacttgacggctcgagtcggctgagcgaagccgagtttgaagtgctgaaggccttcgtggtcgatatgatggaaagacttagaatttcacagaagtgggtccgcgtcgcagttgtcgagtaccacgacggctcccacgcctatatcgggttaaaggatcggaaacgccctagcgagctgcgtcgcattgcatctcaggtgaagtatgctgggagtcaggtcgcaagcacgtcagaggtcttgaagtacactctcttccagattttcagtaagatcgatagaccagaggcgtctcggatcaccctattgctgatggcgtcccaggagccacagagaatgagcagaaatttcgtcagatatgtccaggggctaaagaaaaagaaggttattgtaataccagtggggatcgggccccacgccaatctgaagcaaatccgcctgatcgaaaaacaagccccagaaaacaaggcattcgtcctaagttctgtggatgaacttgaacagcagcgggacgagatcgtgagctacctgtgtgatctggctcccgaggccccgccccctactctaccacccgatatggctcaggtaacggtcgggcccggcctactcggagtgtccacactaggacccaaacgaaacagcatggttttggacgtagcctttgtgctggaaggaagcgataagattggagaggctgacttcaaccgcagcaaggaatttatggaagaggtgattcaaaggatggacgtgggtcaggattctatccatgtgaccgtcctgcagtatagctacatggttaccgttgaatacccattctcagaagcccagtctaagggtgacatcctccagagagtgcgagaaattaggtatcagggcggcaacagaacaaataccggcctggcactgcggtatttatctgatcacagtttcttagtgagtcagggggatcgggaacaggcgcctaatctggtgtacatggtgaccggcaaccccgcctccgacgaaataaagagactgcccggtgacatccaggtggtacctatcggggtgggtcctaacgcaaacgtgcaggagttggagagaatcggttggcccaatgcccctattcttatccaggactttgaaacactgccgagggaagccccagatctcgtgcttcagcggtgttgttcgggtgaaggactacagattcccacactgtcacccgcccccgattgctctcagcccctggacgttatcctgctgcttgatggctcttcctcctttcccgcatcatactttgatgaaatgaagagcttcgcaaaagcttttatatctaaagcgaacattggacctaggctcacgcaagtgagtgtgctacagtacggctcaatcacaaccatcgatgtgccttggaacgtcgtgccagagaaggctcacctgctctcgctcgttgatgtaatgcagagagaagggggaccatcccagatcggtgacgctctgggctttgctgttcgttacctaacgtctgaaatgcacggagctaggccaggcgcgtccaaggccgtggtgatcctcgtcacagacgtgtccgtcgatagtgttgacgctgccgctgatgccgctcgatccaaccgcgtcacagttttccccattgggattggtgatcggtacgacgccgcccagctccgcatactcgccggccctgcaggcgacagtaatgtggtcaagctccagcggattgaagatctgccgacgatggtgacattgggcaacagctttttgcacaagttgtgcagtgggtttgtgaggatctgcatggatgaggacgggaacgaaaagcggcccggcgacgtgtggaccttgcctgaccaatgtcataccgtgacttgccagcccgacgggcaaactctgctcaaaagccatcgtgtgaattgtgatcggggtctgcgaccgagctgcccaaattcgcagtcacccgttaaggtggaggagacatgtgggtgtaggtggacctgcccttgtgtctgcactgggtcatccacacggcacattgttacatttgatgggcagaatttcaagcttactgggagctgctcttatgttctgttccagaataaagaacaggacctggaggtgattttgcataatggcgcatgttccccaggcgcgaggcaggggtgcatgaaaagcatagaggtaaaacactccgccttgtcggttgaactgcatagtgacatggaggtcacggttaacggtcgtctggtgagcgtcccctatgtcggaggaaacatggaagttaatgtctatggcgcgataatgcatgaggtgcgctttaaccatctggggcatatcttcactttcacccctcaaaataatgagttccagctacagttgtcccctaagacctttgcatctaagacctatgggctgtgtggtatctgcgatgagaacggagccaatgatttcatgctgcgcgatggcactgtgaccaccgactggaaaactctggtgcaggagtggacagtacagcggccaggtcagacctgccagccaattctcgaggaacagtgtctggttccggattcgagtcactgtcaggtcctgcttctccccctttttgccgaatgtcataaagtgctggccccagcgacattttacgccatatgccagcaggattcgtgccaccaagagcaggtgtgtgaagtcatagcctcctacgcacacttgtgtcgcacaaacggagtttgcgtggactggagaacgccagacttctgcgcaatgagctgccctccttccctggtctataaccattgtgaacatggctgtcctaggcactgcgacggtaacgtgagtagctgcggcgatcacccatcagaaggatgcttctgcccacccgacaaggtaatgcttgaggggtcatgcgtcccagaagaagcctgcacacaatgtatcggcgaggacggggtgcaacatcagtttctggaggcgtgggtgcccgaccatcagccttgtcagatctgcacgtgcctgagcgggaggaaggtaaattgtaccacccagccttgtcctacagcaaaggcccccacatgtggcttgtgtgaagtggcaagactgcgtcagaatgcggaccagtgttgcccagagtacgagtgtgtttgcgatccggtgtcttgtgacctgccacccgtgcctcattgtgagcgggggctgcaaccaacattaaccaaccctggagaatgcaggccaaatttcacctgcgcttgtagaaaggaagagtgcaagcgggtttcaccaccaagttgcccaccccatcgtctgcccacactgagaaagactcaatgctgcgatgagtatgagtgcgcatgtaactgtgtgaattctactgtgtcatgcccattgggttatctcgcctctaccgctaccaatgattgcggctgcactactaccacctgcctcccagataaggtgtgcgtgcatcggagcaccatttatcctgtaggccagttttgggaggaagggtgcgacgtctgcacgtgtacagatatggaagatgctgtgatgggcctgcgagtcgctcagtgttctcagaaaccctgcgaagatagttgcaggtctgggtttacatacgtgctacatgaaggggaatgctgcggacggtgtcttccgtctgcctgtgaagtggtcactggctcgccgcgcggggatagccagagttcttggaaatccgtcgggtcccagtgggcctctccagaaaatccatgtcttattaacgaatgcgtgcgtgttaaggaggaggtatttatccaacagaggaacgtctcgtgcccacagctagaagtgcccgtgtgtcccagcggctttcagttgtcctgtaaaacatctgcttgttgtccatcgtgcaggtgtgagaggatggaagcctgcatgttgaatggcactgtgattggccccggcaagaccgtgatgattgacgtgtgcaccacctgccgctgtatggtccaagtgggcgtgatcagcggttttaagctggagtgccgaaaaaccacctgtaacccttgtccactgggctataaagaagagaacaacactggagagtgttgtggtcggtgtctgccaaccgcatgtaccatacaactccgcgggggacagattatgactctgaagcgggacgagacgcttcaggacgggtgcgatacccatttttgtaaagtgaacgagaggggcgaatacttctgggagaagcgcgtcaccggctgcccacccttcgacgaacacaaatgcctggctgaaggaggcaagatcatgaaaatacccggtacctgttgtgatacatgcgaggagcccgagtgtaatgatatcaccgcccgactgcagtacgtaaaagtgggttcatgtaaatccgaagtcgaggtggacattcactactgccagggcaaatgtgctagcaaggcgatgtacagcatcgatattaacgatgtacaggaccagtgttcctgttgctcccccacacgcaccgagcccatgcaggtcgcactccactgtacgaacggatcagtggtttatcatgaagtgctcaacgcaatggagtgcaaatgctcccccaggaagtgcagcaag

SEQ ID NO: 21405 - DNA, 8439 bp, synthetic construct
  misc_feature 1..8439: note = source = /note="Description of Artificial Sequence: Synthetic coding sequence"
  source 1..8439: mol_type = other DNA
atgattccagcacgattcgcaggtgtgctgttagcgctcgcgctaatcttgccgggcaccctctgtgctgagggtacgcgtggccgttccagcactgctcgatgttccctcttcggctccgatttcgtcaatacattcgatggctccatgtattcttttgcgggatactgctcatacctattagcgggcggctgccaaaaacgctcgttctcaataattggtgatttccagaacgggaaaagggtctccttgtcagtttacttgggtgaatttttcgacatacacttattcgttaatgggaccgttacccaaggtgatcagagggtgtcgatgccctacgccagcaaagggctttacttggagaccgaggcggggtattacaagctgtctggcgaggcatacggatttgtggctcggattgatggttccgggaacttccaggtgcttctttccgatcgctacttcaataaaacctgtggcttatgcggcaattttaatatcttcgccgaagacgattttatgactcaggaggggacgcttaccagcgatccgtacgattttgctaactcgtgggccctttccagtggggagcagtggtgcgagcgcgcctccccaccgtcatcttcctgtaacatttcatccggcgagatgcagaaaggcttatgggaacaatgccagctactcaagagcactagtgtatttgctcgctgtcatccactggtggatccagagccgtttgtagccctttgtgaaaagactctgtgtgagtgtgcaggcggactcgagtgcgcttgccccgcactattggagtatgcgcgcacctgtgcgcaagagggcatggtcctttatggttggacggaccactccgcgtgtagcccggtctgccccgcaggtatggaatatcgacaatgtgtttcgccatgcgcgcgcacttgccagtcactacatattaatgaaatgtgccaggagcggtgcgtggatggctgcagctgccccgagggtcaactgcttgatgagggactctgcgttgaaagtacagagtgcccgtgtgtccacagcgggaaaagatatcccccaggaacgtcattgagtcgagattgcaacacctgtatctgccgaaacagccagtggatctgttcaaatgaggaatgtccgggagagtgtcttgtcaccggtcagtcacactttaagtctttcgacaatcggtatttcaccttctccggaatttgccagtaccttttggcgagggattgccaagatcattcttttagcatcgtcatagagaccgttcagtgcgcggacgatcgggacgcggtttgcactcgtagcgtaactgtgaggttaccaggcttgcacaactctttggttaagcttaaacatggagccggtgttgcaatggacggacaggatgtacagcttcccctcctgaagggggacttacgaatacagcacacggtgacggcgagtgtgcggctttcctatggcgaggatctgcagatggactgggacggacgcggtaggctgctggtgaaactgagtcctgtatatgcgggtaagacgtgtggactttgcggtaattataatggtaaccagggtgatgattttctaacaccctccggtttggcggagccccgtgtggaagatttcggaaatgcatggaaactacacggtgactgtcaggacctccagaagcaacactcagacccttgcgccctcaaccctagaatgacgcgcttttccgaggaagcgtgcgctgtcctgacttcaccaactttcgaggcttgccatcgagcggtcagtccattgccatatcttcggaactgcagatacgacgtctgtagttgctccgacggccgagaatgcctctgcggggccttggcctcatatgcggcggcgtgcgccgggcgcggagtacgcgtagcctggagggaacccggccgatgtgagcttaactgtcctaagggacaggtctacttgcaatgcggcactccctgtaacctaacctgtcgctcactgtcctaccctgacgaggaatgtaacgaagcatgcttggaaggttgcttttgtcctcccgggctttacatggatgagcggggtgactgtgtgcctaaggctcagtgcccctgttattatgatggggagatctttcagccggaggacatcttctcggatcatcacaccatgtgttactgcgaggacggctttatgcactgtaccatgtctggcgtgcctggatccctgcttcctgacgctgttctgtcatcccccttgagccatcgttctaagcggtcgttaagctgccgtccgcccatggtgaagctggtttgtcccgcagataacctcagggcagagggtctcgaatgcacgaagacttgccaaaattacgatttagagtgcatgagcatgggttgcgtgtctggctgcctatgtcccccgggtatggtgaggcatgaaaatcgatgcgtggcattggaacggtgtccttgttttcatcaaggcaaggaatatgccccgggagagactgtgaaaatcggttgtaatacgtgtgtgtgccaggaccgaaaatggaactgtaccgaccatgtctgtgatgcaacttgctcgaccattggaatggcgcactacttgacgttcgatggcttgaagtacctgttccccggtgagtgtcaatacgtcttagtccaagattattgtgggtccaaccctggtaccttccgaattttggtgggcaacaaggggtgttcgcatccttcagtgaagtgcaagaagcgcgtgaccattttggtggagggtggggagatcgaactcttcgatggtgaggtcaacgtcaaacggcctatgaaggacgaaacacacttcgaggtcgtagaaagtgggaggtacatcattctcctgctcgggaaagctctttctgttgtatgggacaggcatctttccataagcgtggtgctgaagcagacatatcaggagaaagtgtgcggtctgtgcgggaactttgacggaattcagaataatgacttgacttcgtcgaacctccaggttgaggaggatccagtcgattttggcaactcttggaaggtgtctagccaatgtgcggatacccggaaggtacctttggattcatcgcctgctacatgtcacaacaatattatgaagcagacaatggttgactcgagttgcagaatccttaccagcgacgtgttccaggactgcaataagctcgtcgaccccgaaccgtatctggatgtatgcatctatgacacatgtagctgtgagtctataggtgactgcgcgtgcttttgcgataccatcgctgcctacgcgcatgtttgtgcccagcacggaaaggtggtcacctggcggactgccactctatgtccgcagagctgcgaggagcgtaaccttcgggagaacggttatgaatgtgaatggaggtataactcttgcgctcccgcctgccaggtgacctgccagcatcctgagcccctagcctgtcctgttcagtgcgtggagggctgccatgcgcactgtccacccgggaagatcttagatgaactcttacagacgtgtgttgatccggaggactgtccagtgtgcgaagtggccggccgtcgctttgcttctggtaaaaaagttactctgaatccctcagaccccgaacattgtcagatttgccactgtgacgtcgtcaaccttacctgcgaagcctgccaagaacccggtggactggtggtccctccaacggacgctccggtatcgccgactactctttacgtcgaggatatctcggagcccccgctccatgatttctactgctctcggttgttggacctggtctttctcttggacggttctagccggctcagcgaggcggaattcgaggttctgaaggcatttgtcgtcgacatgatggagcgtttgaggatctctcagaagtgggttagggtcgcggtggtagagtatcacgatggctctcacgcctacataggcctgaaggatcgaaagcggcctagcgagcttcgaaggatcgcttcacaagtcaagtatgctggatcccaggtggcttcaaccagcgaagtgcttaaatatacgctgttccagattttctctaagattgatcgaccagaggcttcacgaattacattgctgctcatggcatcgcaagagcctcagcgtatgtctcgcaattttgtccgttatgtccagggcctcaagaaaaaaaaggtgatcgtcattcccgtcggtatcgggccccatgccaacctaaagcagattagactcatcgagaagcaggcaccagaaaataaggctttcgttctgagctcagtcgacgagttggaacaacagcgtgacgagatagtctcgtacctatgcgatcttgctcctgaagctcctccgcccaccctacccccagacatggcacaagtgacggtagggcctggattactgggagtctccacattaggccccaagcgaaacagtatggtcttggatgtggcattcgtgctggagggctccgacaaaattggcgaagcagattttaaccgatccaaggagtttatggaagaggtcatccagcgaatggatgtgggccaggactcaattcacgttactgtgctgcagtactcctatatggttacggttgagtaccctttttccgaggcacaatctaagggagatatcttgcaacgtgtgcgagagatacgttatcaaggtgggaatcgcactaatacgggtcttgcactccggtacctctccgatcactcattcttagtgtcgcagggggatcgcgagcaagccccaaatcttgtctacatggtcacggggaatccagcatctgatgagatcaaacggctccccggcgacatccaggtcgtccctattggcgtggggcctaacgctaacgtccaggagttagaacgcattggttggcctaacgccccgatcctgattcaggatttcgagacgctaccccgagaggcgccggatttagtcctgcaacggtgttgttccggcgagggcctgcaaattcctacactgagcccagccccagactgctcgcaacccctggatgtgatcctccttctggatggctctagctctttccccgcttcctactttgatgagatgaagtcctttgcgaaggccttcatttcaaaagcaaacatcggccctcggctgacccaggtaagcgtcttacagtatggttcaataactactatcgatgtcccctggaatgttgtccctgagaaagcgcatctgctctctttggtggacgttatgcaacgcgaaggtggcccttcccagattggagatgcccttggtttcgcagtacggtacttaacgtcagaaatgcacggggctcgaccaggtgcatccaaggccgtcgtaattttagtaaccgatgttagtgttgacagtgtcgacgctgctgctgacgcagccagaagtaacagggtcactgtttttcctatcggtatcggggatcggtatgacgcggctcaactccgcattctggcgggtccagctggcgactccaatgtcgttaagctccaacgtatcgaggacctgcctaccatggtgaccttgggcaattctttcctacataagctgtgttcgggatttgttcgaatctgtatggatgaagatggcaatgagaagaggccgggcgacgtctggaccctcccggatcaatgtcacactgtcacgtgccaacccgacgggcaaacgcttctaaagtcacaccgcgtcaactgcgaccgtggcctccggccgagttgcccaaattcgcagtctccggtcaaagtcgaagaaacctgcggatgccgttggacgtgtccctgcgtctgcaccgggtcttccacccgtcacattgtgacttttgatgggcagaacttcaagttgactggatcttgctcgtatgttctgttccagaacaaggagcaagatctcgaggtcatcttgcataacggcgcttgttcccctggtgctcggcagggctgtatgaaatcgatcgaagtcaaacacagcgctctgagcgtcgagttacactccgacatggaggtaacggtcaatggacgacttgtctctgttccatacgttggtgggaatatggaggtaaatgtgtacggcgccatcatgcatgaggtgcgtttcaaccatctcggtcatatcttcacttttacgccccaaaacaatgaatttcagttacaactttcccccaagaccttcgcctcaaagacgtacggcttgtgcggcatctgtgacgaaaatggcgctaacgatttcatgctccgggacggtactgtcacgaccgattggaagacgctggttcaggagtggacagtccagcggcctggccagacgtgccaacctattctggaggaacagtgcttggtacctgactcgtcgcactgccaagtccttctccttcctctcttcgcggaatgccacaaggtcctcgcccctgctacattttacgcaatctgccagcaggactcgtgtcaccaggagcaagtttgcgaggttatcgcctcatatgcccatctatgtagaaccaacggtgtgtgcgttgactggcgcacaccagatttttgcgctatgtcatgcccgccatcgctggtgtacaaccactgtgagcacggatgcccacggcattgtgacggtaatgtatcctcgtgtggggatcaccctagtgagggctgtttttgtcccccggacaaggtgatgctggagggatcatgtgttcccgaagaggcttgtacacagtgcataggagaagacggagtgcagcatcaattcttagaggcttgggtacctgatcatcagccttgtcaaatatgcacttgtctgagtgggagaaaagtaaattgtacgacgcagccgtgccctactgcaaaggcccccacttgtggcctgtgcgaggtcgcgcgactacgacaaaatgctgaccaatgttgccccgagtatgaatgcgtgtgtgatccggtgtcctgtgacctgccgcccgttccacattgcgaaagaggactgcagccaactctcactaatccaggagagtgtcgtcccaacttcacttgtgcctgccgcaaagaggagtgtaagcgggtatccccaccctcttgccctccgcacagacttccaacgcttcggaagactcagtgctgcgatgagtacgagtgtgcttgcaattgcgtcaactcgaccgtaagttgtcctctcggttatcttgcaagcacagctacaaacgactgtggatgcaccacgacgacgtgcctgcccgacaaggtgtgcgtgcatcgctcgactatttatcctgtcggccaattttgggaagaaggttgtgacgtgtgtacttgtactgacatggaagacgctgtgatgggccttagggtggcccagtgttcgcagaagccctgcgaggactcgtgtcgaagcggtttcacgtatgtgctccacgaaggagagtgttgtggcagatgcctgccaagtgcctgtgaggtcgtgacgggctcaccaagaggtgattcacagtcgtcatggaagagcgtcggttcccaatgggcgtccccggagaatccctgccttattaacgagtgtgttagggtgaaggaggaagtctttatacagcaaaggaacgtttcatgtccgcagcttgaagtgcccgtctgcccatcaggatttcaactcagctgcaaaacttcggcctgttgcccctcctgccgctgcgagcggatggaggcgtgcatgctaaatgggactgtaatcggacctgggaaaactgtgatgatcgatgtgtgtacaacttgtcgctgcatggtacaagtcggtgttatatccggattcaaactggagtgccgcaagactacatgcaacccttgcccccttggttataaagaggagaataataccggagaatgttgcggccggtgcctccccacagcttgcacaatccagctccgcggtggacagattatgacgctgaagcgtgacgagacgctccaggacggatgcgacacgcatttctgcaaggttaacgagcgcggcgaatacttttgggagaagagagttactggttgtccgccgttcgacgaacacaaatgtttagcagaaggagggaaaatcatgaagattcccggcacctgttgtgatacctgtgaggaacctgaatgtaacgacatcactgcgcgattgcagtatgttaaagttggaagctgcaagtctgaggtggaagtggacattcactattgccaaggaaaatgtgcaagcaaggctatgtactccatcgacattaacgatgtgcaagatcaatgttcgtgttgcagccctacccgcactgaaccgatgcaggtagcgttgcactgcactaatggatcggttgtgtaccatgaggtgcttaacgccatggagtgtaaatgttccccgcgtaagtgcagcaag

SEQ ID NO: 21406 - DNA, 8439 bp, synthetic construct
  misc_feature 1..8439: note = source = /note="Description of Artificial Sequence: Synthetic coding sequence"
  source 1..8439: mol_type = other DNA
atgattcctgccagatttgccggggttttgctcgctttagccttaattctaccggggacactgtgtgcggagggaactcggggcagaagctcaacagctcggtgttcactctttggctccgactttgttaatacgttcgacggatccatgtacagcttcgcgggctattgttcctatctgctcgcaggaggctgccaaaagagatccttttccatcattggtgacttccagaacggcaagcgtgtgtctcttagcgtctatctgggagaattttttgatattcatctgtttgtgaacgggactgtgactcaaggagatcagcgggtcagcatgccttacgctagtaagggcttataccttgagacggaagccggctactacaagcttagtggtgaagcttacggattcgtcgctcggattgacggctcaggtaatttccaggtgctgctgtcagaccgctacttcaacaaaacttgcggtctgtgcggcaacttcaatattttcgccgaggatgactttatgactcaggaggggaccctgacctccgacccctacgactttgccaacagctgggccctgagttccggagaacagtggtgtgaaagagcctccccacccagttcctcttgtaatatttcctctggtgagatgcaaaagggactgtgggagcagtgtcagttgctcaaatcaacctctgtgttcgctagatgccacccactagttgatcccgagcccttcgtggcactgtgcgagaagactctgtgtgaatgcgcaggtggccttgagtgcgcctgccctgccttgctcgagtacgcacgaacttgcgcacaggaaggcatggtgttgtatggttggaccgatcacagtgcttgttctcccgtgtgtccagcaggcatggagtatagacagtgtgtgagtccctgcgccaggacctgtcagtccctgcacatcaatgaaatgtgccaggaacggtgcgtcgacgggtgttcgtgtccagagggccagctgctggacgagggcctgtgtgtggagagtactgagtgcccgtgtgtgcactccgggaagagatatcccccaggaacttccctcagtagagactgcaatacatgtatatgtcgcaactcacagtggatttgttctaatgaagaatgccccggcgaatgtctggtaacagggcagtcacacttcaaatcttttgataataggtactttaccttctctggcatctgtcaatatctgctggcccgtgattgtcaagaccacagcttcagtatcgtaatcgaaaccgtgcagtgtgctgacgatcgagacgctgtgtgcacccgctccgtcaccgtgaggctcccgggattacacaattctctagtcaaactgaaacatggcgcgggcgttgctatggatgggcaggacgtccaactcccgcttctcaaaggggacctccggatacaacatacagtgacggctagtgtgcgcctgtcctacggggaggatctgcagatggactgggacggcaggggccgattgttggtgaagttgagtcctgtgtacgccggaaagacctgtggactgtgtggcaactacaatgggaatcagggggacgacttcctgactccctccggactagccgaacctcgcgtggaggatttcgggaacgcctggaagctacatggtgactgccaagacttgcagaagcaacatagtgacccttgcgcactcaaccctcgtatgacacgatttagcgaagaagcctgtgcagtcctgacatcgccaacttttgaggcttgccatcgcgccgtcagcccactgccctatcttagaaactgccggtacgatgtctgcagctgcagcgacggccgggaatgcctatgtggcgcactggcatcatacgcagctgcatgcgccggccggggcgtcagagtggcctggcgcgagcccggacggtgtgagctaaattgcccaaaagggcaggtgtatcttcaatgtggcacaccgtgcaatttgacctgtaggtctctctcatatcccgacgaagaatgtaacgaggcctgccttgagggctgtttctgtccgcccggactctatatggacgagaggggtgattgtgtgcctaaggctcagtgtccctgctactatgacggcgagatcttccagcccgaggatatattttctgaccatcataccatgtgttactgtgaggatggtttcatgcactgcacaatgtccggcgtgccaggatccttactaccggacgccgttctctcatccccgctttcgcacaggtcaaaaagatcgctcagctgtcgaccgcctatggtgaagctcgtgtgtccagccgacaacctgagggccgaggggctggagtgcactaagacctgccaaaattacgatctggaatgtatgtccatgggatgtgtgtccggatgcttatgtccaccagggatggtgcgtcacgagaatcgatgcgtcgccctggagaggtgcccttgctttcatcagggaaaagagtatgcccccggtgagaccgttaagatcggctgcaacacttgcgtatgtcaggatcgaaagtggaactgcaccgaccacgtgtgtgatgctacctgcagtacaatcgggatggctcactacctcacattcgatggcctgaagtacctctttcccggcgagtgtcagtatgtgcttgtccaggattattgtgggtcgaatccaggtacatttagaattctggtgggcaataagggatgcagccacccgtccgtgaaatgtaagaagcgcgtcactattttggtagagggtggtgagatcgagctgtttgatggagaagtcaacgtcaagcgcccaatgaaggacgaaacgcattttgaggtggtggaatccgggaggtatatcatcctgcttctgggaaaggccctgagcgtggtatgggaccggcatttaagcatctccgtcgtactgaagcaaacctatcaggaaaaagtttgtggcctttgcgggaacttcgacggcatccaaaacaacgatctaacatccagcaacctgcaagtggaggaggacccagtggatttcgggaatagttggaaagtgtcatcacagtgtgccgacacaaggaaagttcctttggattcatcgcctgcgacttgccataataacattatgaaacaaacaatggtcgatagcagttgccgaattcttacgtcagatgtcttccaggactgtaataagttggttgaccctgagccctaccttgacgtctgcatctacgacacatgtagttgtgagagcatcggtgactgcgcttgcttctgtgatactattgccgcttatgctcatgtgtgtgcccagcacggaaaagtggtgacgtggcgaacggccaccttatgtccgcagtcctgtgaggaacgcaacttgagagagaacgggtacgaatgtgaatggcggtataattcatgtgccccagcatgtcaggtgacttgccagcatcccgagcctctcgcctgtcctgtgcaatgcgtggagggctgccacgcccattgcccccctgggaaaatactcgacgagctgctgcagacctgcgttgaccctgaagattgtccggtctgtgaagtggcgggtcggaggtttgcctctggaaagaaagtgacactgaacccgtccgatcctgaacactgccagatctgccactgtgacgtcgtgaacctcacatgtgaagcttgtcaggagccagggggcttggtcgtcccccctaccgatgccccagtcagtccaactaccctctatgtggaagacatcagtgagcccccactccatgacttctattgctcaaggttgttggatctggtgtttcttcttgacggctcttctaggctgagcgaggccgagttcgaagtgctaaaggcctttgtggtggatatgatggaaagactcaggataagtcagaagtgggttcgtgtcgcggtcgtagagtatcacgatgggtctcacgcttacataggcctgaaagacaggaagcggccttcagaattacgccgcatcgctagccaagtgaagtatgccggctctcaggttgcttcaacatccgaagtgcttaagtatactctattccagatctttagcaagatcgacaggcctgaggccagtagaataaccctcctgcttatggcctcccaggaaccgcagcgtatgtcacgaaatttcgtccgttatgtacaggggctaaaaaagaaaaaggtgatcgtgattcctgttgggatcgggcctcatgcaaatcttaaacagattagactgatcgagaagcaggcccctgaaaataaggcctttgtgttgtcctccgtcgatgagctggagcagcaacgggatgagatcgtgtcctacttgtgcgacctggcccccgaggctccgcctcctacactgcctccagacatggcccaggttaccgtgggtcctggactgcttggagtttccacactcggccccaagagaaattcaatggtgttggacgtcgcttttgtgttggaagggagtgacaagataggagaagccgacttcaatagatctaaagagtttatggaggaagtaatccagaggatggacgtcggacaggacagcatccatgtcactgtactgcagtacagttacatggtgaccgtcgaatatcccttttctgaggcccagtcaaaaggagatatcctgcagagggtgcgggagattaggtaccagggcggaaaccggaccaacaccggcctggcgttgcgttatctctccgaccattctttcctggtgagtcagggtgaccgtgagcaggcccccaacctggtgtatatggtgactgggaatccggcttctgatgaaattaagcggcttcctggcgatattcaggtggttcccatcggagtgggcccaaatgcaaacgtgcaagaacttgaaaggattggatggcccaatgcacctattctgattcaggactttgaaactctcccccgtgaggcccctgatctggtgctccaaagatgctgctccggcgaaggcctgcaaattccaaccttatcaccggcgcctgattgcagccagcctctcgatgtcatcctgttgctggatggctcatcctcgtttccggcatcttacttcgacgagatgaagagctttgcgaaagccttcatctcaaaggctaacatcggtccccgcttgacccaggtctccgttttgcagtatggtagcatcaccactatcgatgtgccctggaacgtagttccggagaaggcgcatctgctctccctcgtggatgtgatgcagcgggaaggaggacccagccagataggagacgccctgggattcgccgtcaggtacctaactagtgagatgcatggggctaggccaggcgcgtcaaaggcagtggtaatccttgttacagacgtctctgttgattctgtggacgcggctgcagatgccgctcgttcaaatcgggtgactgtgttccctataggcatcggcgatcggtacgatgccgcccaactgcgaatcctggcaggtccggctggagacagcaatgttgtcaaattgcagcgcatcgaagacctgcctacaatggtgacccttggcaatagctttcttcacaaactttgttccgggttcgtgcggatctgcatggacgaagacggcaacgagaaaagacccggagatgtatggacccttccggatcaatgccataccgtaacttgccagcctgacggacagacactgctcaagtcccatagggtcaactgtgaccgagggctgcggccctcatgtcctaactcccagagtccagtgaaagttgaggagacttgtgggtgccgttggacctgtccttgcgtgtgtacggggagctctacacgccacatcgtgactttcgatgggcagaacttcaaattgaccggatcgtgctcctacgtcctgtttcagaataaggagcaggacctggaggttatcctgcacaatggggcatgttcgcccggggcccggcagggctgcatgaaatccatcgaagttaaacacagtgctctgtcagttgaactgcactctgatatggaggtcactgtaaatgggcggctcgtctcggtcccatatgttggcggcaatatggaagtgaatgtttacggagccattatgcatgaggtgcggtttaaccacctcggccacatattcacctttacaccgcagaataacgaatttcagttacagctgtcccctaagactttcgctagcaagacatatggcctttgtgggatatgtgacgaaaacggcgcgaatgacttcatgttgcgagacggaaccgtgaccactgactggaagactctggtgcaagagtggaccgtgcagagacccgggcaaacgtgccaacccatcctggaagaacagtgtctggtgccggattcatcacattgccaggttctgttactaccgctctttgcggaatgccataaggtcctcgccccagcaaccttttacgcaatttgtcagcaggattcttgtcatcaggagcaggtgtgtgaggttatcgccagttacgcccatttgtgtcgcactaatggtgtgtgcgtcgattggagaacaccagacttctgcgccatgagttgccctccttccttggtgtataaccactgcgaacacggctgtccaagacactgcgatggcaacgtatcttcttgcggggatcatccaagtgagggatgcttctgcccacctgataaggtgatgctggagggcagctgcgtgccagaagaggcctgcacgcaatgcatcggcgaggacggcgttcagcaccagttcctggaggcatgggtgccggaccaccagccctgccagatttgcacatgtctgtcaggcaggaaggtcaactgtaccacacagccctgtcccacggccaaagcacccacgtgcgggctgtgtgaggtggcaagactacgccagaacgctgatcagtgctgtcctgagtatgagtgtgtctgtgacccggtatcttgtgatttgcctcccgttccccactgcgagagggggctgcagccgaccctgacgaatcccggggagtgtaggccaaatttcacgtgcgcatgtcgaaaggaagaatgtaagagagtctccccaccgagctgcccccctcaccgcctgcccacccttcggaagacacagtgttgtgacgagtatgagtgtgcttgcaattgtgtaaatagtactgtgtcttgccctctgggatatcttgctagtaccgccacaaatgactgcggatgcaccactacaacctgtctccccgataaagtctgcgtccacaggagcactatctaccccgtcgggcagttctgggaggagggctgtgacgtgtgtacctgcaccgatatggaagatgccgtcatgggtttgagggtggcccagtgttcacagaagccctgtgaggacagttgtcgaagtggcttcacttatgttctgcacgaaggggagtgctgcggccgttgcttgccgtcagcatgtgaggtggtgacagggagtccccgtggagattctcaatcaagctggaaaagcgtgggcagccagtgggcttcgcctgaaaatccatgcctcatcaacgagtgtgtgcgcgtgaaggaggaggtgttcatccagcaacgcaacgtctcttgtccccagctcgaggtgccagtgtgccccagcggcttccagctgtcttgcaagacttcagcctgttgtccatcctgtaggtgtgagagaatggaggcctgcatgttgaacgggactgtcattggccccggcaagacagtgatgatcgatgtttgtactacgtgccgttgcatggtgcaggtgggcgtcatctccggatttaaattggaatgtcggaagactacctgcaatccgtgtcctctgggctacaaggaggagaacaataccggcgagtgttgtggaagatgcctgcctactgcctgcacaattcagctgcggggtggacagatcatgaccctgaagcgcgatgagactctccaggacggatgtgacactcacttctgtaaggtgaatgaacgaggggagtacttttgggagaagcgagtgacgggctgtcccccattcgacgaacataagtgtctcgcagagggcggcaaaatcatgaaaatacctggaacttgttgcgacacttgtgaagagcctgaatgtaacgatataaccgcgcggctccaatacgtcaaggtgggaagttgcaagtccgaagtagaggtagacattcattattgtcaggggaaatgcgcaagtaaagcaatgtattccatcgatattaacgacgtgcaggatcagtgttcctgctgctccccgacccgaaccgaacctatgcaggtcgctctgcactgcactaacggaagcgtggtgtaccatgaagtcttgaatgctatggagtgcaagtgctccccacggaaatgcagcaaa

SEQ ID NO: 21407 - DNA, 8439 bp, synthetic construct
  misc_feature 1..8439: note = source = /note="Description of Artificial Sequence: Synthetic coding sequence"
  source 1..8439: mol_type = other DNA
atgatcccagcaagattcgctggtgtccttctagctcttgctctcatccttcctggaaccttgtgtgcagaggggaccaggggaaggagttcaacagcgagatgctcgctcttcggatcggacttcgtgaatacattcgacggaagcatgtatagcttcgccggatactgcagctacctgctggccgggggctgtcagaagagaagcttctctataatcggcgacttccaaaacggaaagcgggtcagcctgtcggtctatttgggggaattttttgatatacatctctttgtcaatggaaccgttacacagggagatcagcgggtgagcatgccctatgcctcaaagggtttgtacctcgaaactgaggctggatactacaaactttcgggggaagcttatgggttcgtggccaggattgatggtagcggcaattttcaagttctgctgagcgaccgatactttaataagacttgcggactgtgcggaaacttcaatatattcgccgaggacgattttatgacccaggaaggcaccctgacctccgacccttacgacttcgcgaacagttgggctctgtcaagcggagagcaatggtgcgaacgcgcctcaccaccgtcctcgagttgtaacatctctagtggcgaaatgcagaagggtttgtgggagcaatgtcaacttctcaagagcacgagcgtgtttgcccggtgtcacccactcgtcgacccagaaccatttgtggctctgtgtgaaaagactctgtgcgagtgtgccggagggttggaatgcgcctgtcccgccctgttggaatacgcccgaacatgcgcccaagaaggaatggttttgtacggttggacagaccacagcgcttgttcacctgtctgccctgccggaatggagtacagacagtgcgtgagtccctgcgctcggacctgccagagcctgcatattaacgagatgtgtcaggagagatgtgtcgatggttgctcttgccctgagggccagctgctggacgaaggtctatgcgtggagagcaccgagtgcccgtgcgtgcactccgggaagaggtacccgcccggaacaagcctgtcaagggactgcaacacatgtatctgtagaaatagccagtggatctgcagcaatgaagagtgtccgggtgagtgtcttgttacaggccagtcacactttaagtcttttgacaatagatacttcacattctctggcatctgccagtaccttctggcaagagattgccaggaccactccttctcgattgttatcgagactgtccagtgcgctgatgaccgcgatgctgtttgtactcggtcagtgaccgtgcgtttgcccggtttgcataattccttagtgaagctaaaacatggcgccggcgtggcgatggatggccaggacgtgcagctgccactgctgaaaggcgatttgagaatacagcataccgtcacagcgagcgtccgccttagctatggagaagatctgcagatggattgggatggtcggggaaggctccttgtgaagttatcacccgtgtatgcaggcaaaacctgcggcctgtgtgggaactacaatgggaaccagggagatgacttcctgacaccttcaggcctagccgagcctcgggttgaggacttcggtaatgcatggaagctccatggagattgccaggacttgcagaagcagcactctgatccctgtgccctgaaccctcggatgacgaggttctcagaagaagcttgtgctgttctgaccagccctacgtttgaagcctgccatcgggctgtgtccccacttccatatttacggaactgtagatacgacgtctgctcgtgttcggacggccgagagtgcctctgcggcgccttggccagttacgcagcagcatgcgcagggaggggcgtgcgggtggcctggagagagcccggtcgttgcgaacttaactgtcccaaaggccaggtgtacctacagtgcggtacaccctgcaacctgacatgccgctctctcagctacccagacgaagaatgcaacgaggcatgtctggagggatgcttctgtccccctgggctgtatatggacgagaggggagattgcgttccaaaagcacagtgcccttgctattatgacggcgagatctttcaacctgaggacattttctcagaccaccatacaatgtgctattgcgaagacggttttatgcattgcactatgagtggcgtgcctggaagcctgctcccagatgcggtgcttagctccccactatcccatcgctcgaagaggtccctgagttgtcggcctccgatggttaagttggtctgccccgccgacaacctgagggccgaaggtctggaatgtactaagacatgccagaattacgacctggaatgcatgagtatgggttgcgtaagcggatgtctctgccctccagggatggtgaggcatgagaatagatgtgtggcacttgaacggtgcccttgctttcatcaggggaaagaatacgcgccaggtgagaccgtcaaaataggctgtaacacgtgcgtctgtcaagaccgcaaatggaattgtactgatcacgtgtgtgacgctacatgtagcacaatcggcatggcacattaccttactttcgacggtctgaaatatcttttccctggcgaatgccagtatgtactggtacaggactattgcggctccaatccaggcacatttcggattctcgtggggaacaagggttgctctcatccctccgtgaagtgtaaaaagagagtcacaatcctcgtcgagggaggcgaaattgagcttttcgatggtgaggtaaacgtcaaacgcccaatgaaggacgagacccactttgaagtggttgaatcagggcgttatataattctgttgctggggaaggccctctctgtggtgtgggatcggcatctctcaatcagcgtggtactgaagcagacttatcaagaaaaggtatgcggactgtgtgggaacttcgacgggatacaaaacaatgatttgacttctagcaatcttcaggtcgaagaggaccctgtggatttcggcaattcatggaaggtgagtagccagtgcgcggacacccgcaaggttcctctagactcttcgcctgccacgtgccacaataatatcatgaaacagactatggtggattcatcctgtaggatcctaacatccgacgtgtttcaggattgtaacaagctggtagatccggagccatacctagacgtgtgcatatacgacacatgtagctgtgagtctatcggagactgtgcatgcttttgcgatactatcgcggcgtatgcacacgtgtgcgcgcagcatgggaaggtagtgacatggagaactgccacactgtgccctcaatcttgcgaggagcggaacctccgagaaaatggctatgagtgtgagtggaggtacaattcgtgtgcacccgcctgtcaggtgacctgccagcaccccgagccactggcctgccccgtgcagtgcgtggaaggctgccacgctcattgcccccccgggaaaatactggatgagctgttacaaacctgcgtagatccggaagactgccccgtgtgtgaagttgccggaaggaggttcgcttccggaaaaaaagtcacactcaatccttctgaccctgaacattgccagatctgccattgcgatgtcgtaaatctgacctgcgaggcctgtcaggagcccggaggattggtcgtccctcctacagatgctcctgtatctcccactaccctctatgtggaagacattagtgagcctccactgcatgacttttattgctcccgactactagatctcgtttttctgctcgatggatctagccggctaagtgaagctgagtttgaagtgctgaaagcattcgttgtggatatgatggagcgcctcagaattagccagaaatgggtgcgggtagcagtggtggaataccacgacggcagtcacgcatatatcggcctcaaagatagaaagaggccatcggagctcaggcggattgcttcccaggtcaagtacgctggcagtcaagtggcgtccactagtgaggtcctgaaatataccctgttccagatattttcgaaaatcgataggccggaggcgagtcggattacgcttctgttaatggcttcccaggagccccaacgtatgagtagaaacttcgttagatatgtgcagggtctgaagaagaaaaaagtaattgttattcccgtaggcattgggcctcacgcaaatctcaagcagatcaggctcattgaaaagcaagcacctgaaaacaaggccttcgtgctcagcagtgtggatgagctcgagcaacagcgggacgagatcgtgtcttatctttgtgacctggcccctgaggcaccgccccccactctgccacccgatatggcccaggtgactgttggcccaggtttgttgggcgtgtccaccctaggacccaagaggaacagtatggtgttagatgtggccttcgtgctggagggatcagataaaatcggagaggcagatttcaaccggtctaaggagtttatggaggaagttatccagaggatggatgtgggacaagattcaattcacgtaaccgtgctgcagtactcgtacatggtgacagtggagtatcccttttctgaagctcagagtaaaggagacatcctgcagcgcgtgcgcgaaatccgctaccagggcgggaatcgaaccaacacgggtttagcactgcgatacttatcagatcactcgttcttggtgtctcagggggatagggagcaggccccgaacctggtgtacatggtgactggaaacccagctagcgatgagatcaaacggctccccggggacatccaggtcgttccaataggggtcggtcccaatgcaaacgtccaggagctggaaagaattggttggccaaatgcaccaatccttatccaggacttcgagaccctgcctagggaggcgcctgatctggttctgcagaggtgttgttccggagaaggattacagattcctacattgagcccggcccctgactgttctcaacctctggacgtaatcctgcttctcgacgggtctagctcattcccagcctcctacttcgacgagatgaagagcttcgccaaggcattcattagcaaagcaaacataggccctcgcctgactcaggtctctgtccttcagtatgggtcaattaccaccatcgacgtaccctggaatgtggtgcccgagaaggcccacttgctgtccctcgtcgatgttatgcaacgtgagggcggcccgtcgcagataggcgatgccttggggtttgccgtgcgctaccttacatccgagatgcatggtgcacggccgggtgcctccaaagctgtggtgatacttgtgactgatgtttcagttgatagtgtcgatgcggccgcggacgcagcgcgcagcaacagggtgacagtgttcccaatcggcataggggatcgctatgacgctgcccagctccgtattctggcaggccccgccggggattcaaatgttgtgaagctgcagcggattgaggacttacctactatggttacccttggcaattcgttcctgcacaagctgtgctccgggttcgtaaggatctgcatggatgaggatggaaatgagaaaaggccgggtgacgtttggaccctgcctgatcagtgtcataccgttacttgccaaccagacgggcaaaccctgctgaaatcccaccgcgtcaattgcgatcgcgggctgcgaccgtcctgccctaactctcagagccccgtgaaggtcgaggagacatgtgggtgccgatggacatgcccctgcgtctgcacaggcagttccacccggcatatcgtcactttcgatggacagaacttcaaactcactggtagttgtagctatgtgcttttccagaacaaagagcaagatctcgaagtcatcctgcataacggggcgtgcagcccgggagcgagacagggttgcatgaagagtatcgaagtaaaacacagcgctctgtcggtggaattacatagtgacatggaggtgaccgttaacggccggctagtgtcagtaccctacgtgggcggaaatatggaggttaatgtgtacggagccatcatgcatgaggtgaggtttaaccatttggggcacatctttacattcactccacagaataatgagtttcagctgcagctgtctcctaagacctttgcgtcaaagacgtatggcttgtgtggtatctgtgatgagaacggtgccaacgatttcatgcttagggatgggaccgtcacaactgattggaaaacactcgtacaggaatggactgtacagaggcctgggcagacttgccagcctatccttgaggaacagtgcctggtgccggatagcagccactgtcaggtcctgttactgcctctttttgccgagtgccataaggtgctggcccccgccaccttttatgcgatatgtcagcaggattcctgccaccaggaacaggtttgtgaggtaattgcttcctacgctcacctgtgccgaaccaacggggtctgtgtagactggaggacgccagatttctgcgctatgagctgccccccttccctggtttataaccattgtgaacacggatgccctcgccattgtgatggaaatgtcagctcttgcggcgaccacccatctgagggttgtttctgtccgcctgataaggtaatgctcgagggctcctgcgtacctgaggaagcatgcacccaatgcatcggggaagacggcgtccagcatcagttcttggaggcctgggtccccgaccatcagccctgtcagatatgtacctgcctctccggaaggaaggtcaattgtactacccaaccttgtccgacggcaaaggcccccacgtgcggcctgtgtgaagtggcaagactgcggcagaacgcagaccagtgttgtcctgagtatgagtgtgtgtgcgatccagtcagctgcgatctaccccctgtgccccattgtgagagggggcttcagcctaccctcactaacccaggcgagtgcagacctaattttacctgcgcgtgccggaaggaggaatgcaaacgggtgagtcccccgagctgcccacctcaccggctgcccactctgcgtaagacccaatgttgtgatgaatacgaatgtgcttgtaattgtgtcaactccactgtgagctgccccttaggatacttagcctcaaccgcaaccaatgactgtggatgtacgacaacaacatgcctgccagataaggtgtgtgtgcatcggtccaccatatatcctgtcggtcagttctgggaggaagggtgcgatgtctgtacttgtacagacatggaggacgcagtgatgggattgagagtggcacaatgctcgcaaaagccctgcgaagactcatgtcggtccggctttacatacgtgctccatgagggggagtgttgcggcaggtgcctccccagtgcctgtgaggtcgtcaccggatccccacggggagactcacagtcttcctggaagtccgtcggctctcagtgggcttcccccgagaatccgtgcctgatcaacgaatgcgtccgggttaaagaggaagtgtttatccaacagcgtaacgtttcctgtccccaactggaggtcccagtatgcccttcggggtttcagctgtcatgtaagacctctgcttgctgtcctagttgccggtgcgaacgaatggaagcctgcatgctcaatggcactgtcatcgggccgggcaaaactgtcatgatcgacgtctgcaccacctgtcgctgtatggtacaggtcggtgtcatatccgggtttaagctggaatgccggaagactacttgcaacccgtgtccactgggttataaagaagagaataacacaggggagtgttgcggacgctgcctgcccactgcttgtaccatacaactcaggggcggacagattatgacactaaagagggatgagacgctgcaagacgggtgcgatacccacttctgtaaggtaaatgaacgcggagagtatttctgggagaaaagagtaacaggctgcccacctttcgatgagcacaagtgtctggctgaaggcggtaaaatcatgaagatccctggaacttgctgtgacacgtgcgaggaaccagagtgcaacgatatcacagcgcgattgcagtatgttaaggtcgggtcctgtaaatctgaggttgaggtggacattcactactgtcagggtaagtgcgcaagtaaagctatgtattccatcgatataaacgacgtgcaggatcaatgctcctgctgcagtcccactagaactgagcctatgcaggtggcccttcattgcacgaacgggtcggttgtgtatcacgaggtactgaacgcaatggaatgtaagtgttccccgaggaaatgttccaaa

SEQ ID NO: 21408 - DNA, 8439 bp, synthetic construct
  misc_feature 1..8439: note = source = /note="Description of Artificial Sequence: Synthetic coding sequence"
  source 1..8439: mol_type = other DNA
atgattccagcccggtttgcgggcgttcttctggctctggctctaatattaccaggtaccctatgcgccgagggcacaagggggcgaagtagcactgccaggtgctcactgttcggctctgatttcgtaaatacattcgatggatccatgtactccttcgctgggtattgttcttatttgctcgccgggggatgccagaagaggtctttcagcatcattggcgattttcagaatggcaagagagtgtcactgtctgtctatctcggtgagttcttcgatattcacttattcgtcaacggcaccgtcacccagggggatcagagggtatccatgccgtacgccagtaagggcctgtatctggagactgaggccgggtactataaacttagcggtgaagcgtacggtttcgtcgcgcgcatcgatggaagcggcaacttccaggtcctcttgagcgaccggtattttaacaaaacgtgcgggttatgtgggaatttcaatatattcgcggaagatgacttcatgactcaggaggggaccctgaccagcgacccctatgatttcgcgaacagctgggccctgagctctggagagcagtggtgtgaacgggcatcccccccatcctcatcctgtaatatctccagcggcgaaatgcagaagggcctgtgggagcagtgccagttgctgaagtcgacttccgtctttgcccggtgtcaccccctcgtggacccagaaccttttgtagctctgtgcgaaaaaaccctttgcgaatgcgctggaggcctggaatgtgcctgtccagctctgctggagtacgcccgcacatgtgcccaggagggtatggtcctttatggatggacagaccattctgcatgcagtcccgtctgtccagctggcatggagtacagacaatgtgtgtccccttgcgcccgtacttgccagtcccttcacataaacgagatgtgtcaggagcgttgtgtggacggttgtagctgtccagaaggtcaacttttggacgaggggctatgcgtcgagtccacagaatgcccttgtgtgcacagcggaaaacggtatcctccaggtacatcactgtcccgcgattgcaatacatgtatttgcaggaacagccagtggatttgcagcaatgaggagtgcccgggggagtgtttggtgactggtcagtcccactttaaatctttcgataataggtactttactttctcaggtatatgccagtacctcctcgcccgggactgtcaagatcattccttctctatcgtgattgagaccgttcagtgcgccgatgaccgagacgctgtgtgcaccagatccgtgactgtgcgactccctggactgcacaatagtcttgtcaaattgaaacacggtgctggagtggcaatggatggccaggacgtccagctgcccctgctgaaaggtgatcttcgcattcaacataccgtaacagcctcagtgcgactgtcatacggcgaagatctacagatggattgggacggccgtggcagacttctggtgaaattatctccagtgtacgctggaaaaacatgtggcctctgcgggaattataatggcaaccaaggggatgactttctcaccccgtctggacttgccgaaccccgcgtcgaggattttgggaacgcttggaaacttcacggggactgtcaagatcttcagaaacagcactccgatccttgcgccttaaatccccggatgacccggttctcagaggaagcctgtgccgtacttacatctcccacattcgaagcttgccatagagccgtatctccactcccatatctaagaaactgccgatacgatgtttgtagctgcagtgacggacgcgaatgcctctgtggcgctttggcttcttacgccgccgcctgtgcgggcagaggtgtccgggtggcctggagggaaccagggcgttgtgagctgaactgtccgaaggggcaggtgtacctacagtgcgggaccccctgtaaccttacatgtcgcagcctatcttacccagatgaggagtgcaatgaagcctgcctagaggggtgtttctgtccacctggattgtacatggacgagcgaggagactgtgtcccgaaggcacagtgcccatgctattacgatggcgaaatcttccagcctgaagatattttcagtgatcaccacaccatgtgctactgtgaagatggctttatgcattgtactatgtcgggagtccctggatccctccttcccgacgccgtgctgagctctccactatctcaccgaagcaagcgatcactatcctgcaggccccctatggtcaagttggtttgcccagccgataatctgcgggctgagggcctggagtgcactaaaacctgtcaaaactatgacctcgaatgtatgtccatggggtgcgtgtccgggtgcctatgtccacctggcatggtgagacacgaaaatcggtgcgttgccctcgagcggtgcccctgctttcaccaaggtaaagaatacgccccaggggagaccgtgaagattggctgcaacacctgcgtttgccaggaccggaaatggaactgcaccgaccacgtgtgcgacgccacctgctctacaataggcatggcccattacttgacattcgatgggcttaagtacctatttcccggggagtgccagtatgtgctcgtccaagattattgcggatctaaccctgggacattcaggatcttagtgggaaacaaggggtgtagccatccatcggttaagtgcaagaagcgggtgaccatcctcgtcgaaggcggggagatcgaactgttcgatggcgaggtgaacgtcaagcgccctatgaaggacgaaacccacttcgaagtagtggaaagcggccgctatatcattcttctccttggcaaggcgttatccgtcgtgtgggatcgtcacctgtctatctcggtcgtactgaaacagacataccaggaaaaggtgtgcggactctgcggcaactttgatggcatccagaacaatgacttgacatcctctaatctgcaggtggaggaggacccggtcgacttcggtaactcctggaaagttagttcacagtgtgccgatacccgcaaagttcccctggactcttcgcccgcaacatgtcataataatattatgaaacagactatggttgattcctcttgtcgtatattgactagtgacgtctttcaggactgtaataaactggtggatccagaaccatatctggacgtctgtatctatgatacatgcagctgtgagagcataggcgattgtgcttgcttctgcgatacgatcgctgcctatgcacacgtgtgtgcccagcacggaaaggtggtaacctggaggacagctactttatgcccccagagttgtgaagagcgtaatttaagagaaaatggatacgagtgcgagtggcggtataattcctgcgcccccgcctgtcaggtaacctgccagcaccctgagcctctggcctgccctgtgcaatgcgtcgaagggtgccacgcgcattgcccccctggtaagatcctggatgaattactgcagacctgcgtggacccagaggactgccccgtttgcgaggtcgcaggtaggcgttttgctagtggtaagaaggtgacgttgaatcctagcgacccagagcactgtcaaatctgtcactgcgacgtagtgaatcttacctgcgaggcatgccaagagcccggaggcttagtagtcccacccacagatgccccagtcagccccaccaccctgtatgttgaggatatctccgagcctcccctccatgatttttattgtagccgcctgttggatctcgtgtttctgcttgacgggtcatcccgtttatccgaagcggagttcgaagtgctcaaagccttcgttgtggacatgatggaacggttgcgcatctcacaaaagtgggtgcgcgtggccgtcgtagaataccacgatggaagccacgcttacataggcttaaaggaccgcaaacgtccctcagagttacgccggattgcgtcccaggtaaagtatgcgggatctcaggtggcttccacatctgaagtactgaagtatacactgttccagatctttagtaaaatcgacagacccgaagcttctcggattacccttctgctcatggcaagtcaagaacctcaaaggatgtcacgcaactttgtgagatatgttcaggggctgaagaagaaaaaagtcattgtaatcccagtgggaatcgggccacacgcgaacctgaagcagatacgattaattgaaaagcaagcacctgagaataaggctttcgtgcttagttctgttgacgaactggagcagcaacgagacgagatcgtaagttacctgtgcgatctggctccagaagcccctcctcctactctgcctccagatatggctcaagttacagtaggtccggggttactaggcgtttcgaccttaggaccaaagcgcaatagcatggtgcttgacgttgctttcgtgttggagggcagcgataagatcggagaagcggacttcaataggtccaaggagttcatggaggaggttattcagaggatggacgtcggtcaggattcgatccatgtgaccgtgctgcaatatagttacatggtaacggtcgagtacccgtttagtgaggcccaaagcaagggcgatatactacagcgcgtgcgggagatcagatatcaggggggaaaccggacaaacacaggactggccctcaggtacctttcagatcatagcttcctggtgagtcagggcgatcgagagcaggcccccaatctggtgtacatggtaacaggtaatccagcgtcggatgaaattaaaagactgcccggcgacatccaggtggttcctattggggtcgggcccaatgccaatgtgcaggaattggagagaatcggctggccaaatgcccctatcctgattcaggacttcgagacacttccaagagaagcccctgacttagtcctgcagcgctgttgtagcggggagggtctgcagataccaacactgtcccccgctcccgattgtagccagcccttggatgtaatactgctcctggacggtagcagtagcttccccgcctcctatttcgacgaaatgaaatccttcgctaaggcattcatttccaaggctaatataggtccacgtttgactcaggtgtccgtgctgcagtacggctccattactaccattgacgtaccgtggaatgtagttcctgagaaggcccatctcctgtccttggttgatgtgatgcaacgtgaggggggccccagtcagattggagacgctctgggctttgcagtgagatatctcacatctgagatgcatggagctcgaccaggagctagtaaagccgttgtgatcttggtcaccgacgtgtcagtcgactctgttgatgctgctgcagacgcagcaagatccaatagagtgacagtgttccctatcggcatcggcgaccgctacgacgccgcccaactgcgcatcctggctggacccgctggcgattcaaatgttgtgaagctccagagaatcgaggatctgcctaccatggtgacactgggcaacagtttcctccacaagctgtgtagtggctttgtgcggatttgcatggacgaagatggcaatgagaagcggccgggagatgtgtggactctgcctgatcagtgccacaccgttacttgccaacccgatggtcagactctgctaaagagccaccgcgtgaactgcgatcgcggtctcaggccttcatgcccaaactctcagtccccagtgaaggtggaagagacatgcggctgtcggtggacctgtccttgcgtttgcactggatccagcactagacatatagttaccttcgacgggcagaattttaagttaactggtagctgttcctacgtgctattccagaacaaagagcaggatctcgaggtgattctgcacaatggtgcgtgctccccaggagctcgtcagggatgtatgaagtcaattgaggtgaaacatagtgccctcagtgtagaactccatagcgatatggaggtcaccgtcaatgggcgactcgtcagtgtcccatatgtgggtggtaacatggaggttaacgtctatggagcgattatgcatgaagttagattcaaccacctgggccacattttcactttcacgcctcagaataacgaatttcaactgcaactgtcacccaaaacattcgccagcaagacctacggcctgtgtggcatctgcgatgaaaatggagccaatgattttatgttaagagatggcaccgtgacaactgactggaagactctcgtccaagagtggaccgtacaacgccccggtcaaacttgtcagcccattttagaggagcagtgcctcgttccagattctagccattgtcaagttttgctactgcccctgtttgccgaatgtcataaagtgttggctccagccacgttctacgctatatgccaacaggactcttgtcatcaggagcaggtatgtgaggtgatcgctagctatgctcatctctgtagaacaaatggagtgtgcgtcgattggcgaacacccgacttttgtgcaatgtcgtgccccccaagtcttgtgtacaaccattgcgagcatggttgcccgcgtcattgtgatggtaatgtgtctagctgcggcgaccacccatcagagggctgtttttgccccccagacaaggtaatgctagaaggttcatgtgtgccagaagaggcctgtactcaatgtatcggagaggatggtgtccagcaccagtttcttgaagcctgggtgcctgaccaccagccgtgccagatttgcacatgcttatcggggcgcaaagtgaattgtactactcagccatgcccaaccgctaaagctccgacgtgcggtctctgtgaggtagcccggttacgccaaaacgctgaccagtgctgtcccgagtacgagtgcgtgtgcgatcccgtttcatgcgacctgccacctgtcccacactgcgagagaggcttacagccaacactgaccaaccccggagagtgccggccaaatttcacgtgtgcctgcaggaaggaggaatgtaaacgagttagcccgcctagctgtcccccccaccgtctgccgaccctgaggaagacgcagtgctgtgacgagtacgaatgcgcatgtaactgcgtaaactctactgtctcttgcccccttggttacctagcttctactgccacaaacgactgtgggtgtacgaccaccacttgcttgccagacaaggtgtgtgtgcacaggtccaccatctaccccgtgggccagttttgggaggagggctgcgatgtgtgcacctgcaccgacatggaagatgccgtcatggggctgagggtcgctcaatgcagccagaaaccttgtgaggatagttgcaggagtggttttacctacgtgctgcacgagggggaatgctgtggcagatgcctgccgagcgcttgtgaagttgtgacaggatctcctagaggcgatagccagtcatcctggaagtccgtcggatcccagtgggccagtccagagaatccttgtttgatcaatgagtgcgttcgggtgaaggaagaagtgttcattcagcagagaaatgtttcatgccctcaattagaggtgcccgtctgtccatcgggtttccagctctcttgtaagacatcagcgtgttgcccctcatgccgttgtgaaagaatggaagcttgcatgctcaacggcactgttatcggccccgggaaaactgtgatgattgacgtgtgtaccacctgtagatgtatggtgcaagtaggcgtgatcagtgggttcaaactcgagtgcaggaaaaccacctgcaacccatgcccgctgggctataaggaagaaaacaatacgggtgagtgttgtggccggtgcctgcctaccgcatgcaccatccagctgcgcggaggacagatcatgaccctgaaacgagatgaaacactgcaagatggatgcgacacacatttttgcaaggtcaacgaaagaggcgagtacttctgggaaaagagggtcactggttgtccgccctttgacgaacataagtgtctggccgaaggcggaaaaatcatgaaaattcccggtacctgctgcgacacctgtgaggaacccgagtgcaatgacattaccgctagactgcaatatgtgaaggttggcagttgtaaaagtgaggtggaggttgacatccactattgccaaggcaaatgcgccagcaaggcaatgtactctattgatattaacgatgtccaggaccagtgttcctgctgctcgcctacgcggaccgaaccgatgcaggtggctctccattgcactaatggaagcgttgtatatcacgaagtgcttaacgccatggagtgtaagtgctcaccccgcaaatgctctaaa

SEQ ID NO: 21409 - DNA, 8439 bp, synthetic construct
  misc_feature 1..8439: note = source = /note="Description of Artificial Sequence: Synthetic coding sequence"
  source 1..8439: mol_type = other DNA
atgatcccagcccgattcgctggagttctcctcgcactggcccttatcttgcccggcacactgtgtgctgagggcacccggggaagatcttccacggccagatgcagtctgttcggctcagatttcgttaacactttcgatgggagcatgtatagtttcgcaggatactgttcttatctcctggccgggggctgtcagaagagatctttctcaattattggcgactttcagaatggaaaacgagtgtctctctctgtgtacctgggagagtttttcgacatacacttgttcgtgaacggaactgtgacacaaggagaccagcgggtgtccatgccttatgcctccaagggcctgtacctggagacagaggcaggctactataagctctctggcgaagcttacggatttgtggcacgaatcgatgggtcagggaatttccaggtcctcctcagtgatcggtatttcaataagacttgcggattgtgtggcaattttaacatattcgctgaggacgacttcatgactcaggagggaacactgacaagcgatccttatgattttgctaacagttgggccctgtcatccggcgagcagtggtgcgaacgagcgtctcctccctcttcttcctgcaacatatcttcaggtgaaatgcaaaagggcctgtgggagcagtgccaattgctgaagagtacttcagtttttgcacgatgccacccacttgtggatcccgagcctttcgtggctctgtgcgaaaaaactctgtgtgagtgtgcaggcggcctggaatgcgcttgccctgctctgttggagtatgctcgaacctgtgcacaggagggaatggtcctttacggatggactgaccatagtgcctgctcccccgtatgccctgcgggaatggagtacagacagtgtgtgagcccctgtgcccgaacatgccagtccctgcatatcaatgagatgtgtcaagaacgatgtgtggacggatgtagctgtccagagggtcagctgctggacgaggggctttgcgtggagtccactgagtgtccatgcgtgcactcagggaaacgctatccccctggtacctcactgagtagggactgtaacacgtgtatctgtagaaacagccaatggatctgtagcaacgaggagtgcccaggggagtgcctggtgactggccaatctcacttcaagtcctttgacaaccgatatttcacattttcaggaatttgccagtacctcctcgctcgggactgccaggatcattccttcagtatcgtgatcgagactgtgcagtgcgctgatgaccgcgatgccgtctgtacacggtctgtgaccgtgcggctgccagggctccacaactctctggtgaagctgaaacacggtgcaggggtggcaatggacggccaggatgtgcagcttcctctgctgaagggcgacctcagaatccaacataccgttacagcttcagtaagactcagttacggagaagaccttcagatggactgggacgggcgcggaaggctgctcgtcaaattgtcccctgtatacgctggcaaaacatgcgggctgtgcggaaattataatggcaatcagggcgatgactttctgactccatctgggctggccgagcctcgggtggaggactttggtaacgcatggaagctgcacggagactgtcaggacctgcagaagcagcactctgacccttgcgctttgaatccccgaatgactcgattttcagaagaggcctgcgctgtactgacttctcctactttcgaagcgtgtcatagagccgtgagcccactgccctaccttcgcaattgtcggtatgacgtatgttcttgctccgacgggagagagtgcctctgcggtgcgctggcctcctatgccgccgcctgcgcggggagaggggtgagagtggcatggagagagcccgggagatgtgaattgaactgtcccaagggccaagtatatctgcagtgcggcacaccatgcaaccttacctgtaggagcttgagctaccccgatgaagaatgcaacgaagcttgtctggaggggtgcttctgccccccaggcctgtacatggatgagcgaggggattgcgtcccaaaagctcagtgcccttgctactacgacggcgagatttttcagcccgaggacatctttagtgatcatcacaccatgtgttactgcgaggatggcttcatgcattgtactatgtctggcgtgccaggcagcttgcttcctgatgcagtgctgagctctcctctgtctcaccgctctaagcggagcctgtcctgccggccccctatggtaaaactggtgtgccccgccgacaatctgagggcagaaggtctggagtgtaccaagacttgccagaactacgacctcgagtgcatgtccatgggatgcgtctccgggtgcctctgccctccaggtatggtgcgccacgaaaacagatgcgtcgccctggagcggtgcccttgcttccaccaggggaaagagtacgcacccggtgagactgtgaaaatcggatgcaatacctgtgtatgtcaggataggaagtggaattgtacagaccacgtgtgtgacgccacatgtagcaccattggcatggctcattatctgacgtttgacggcctgaagtacctcttccccggagagtgtcaatacgtactggtccaggattactgtggaagtaaccctgggaccttcaggattctggtgggcaataaggggtgtagccatcccagtgttaagtgcaagaaacgcgtgacgatactggtggaaggcggcgagattgagctgttcgacggtgaggttaacgttaagcggcccatgaaggatgagacccatttcgaagtagtcgaatccgggagatacatcatcctgctgcttggcaaggcactgagtgttgtgtgggatcggcacctgtccatctccgttgtgctgaaacagacataccaggaaaaggtgtgtggactttgcgggaattttgatggaatccaaaacaacgacctgaccagtagtaacttgcaggtggaggaagacccggtggactttgggaatagttggaaagtgagctcccagtgtgctgataccagaaaagtaccccttgattcatctccagccacatgccacaataacataatgaagcagaccatggtggatagtagctgtaggattctgacttctgatgtgttccaggattgcaacaagctggttgatccggagccttatctggatgtgtgcatctacgatacttgctcctgtgagagtataggagactgcgcatgtttttgtgataccattgcagcctacgcgcacgtttgcgcacagcacggcaaagtggtcacatggagaactgccacattgtgtccgcagagctgcgaggagagaaatctcagagagaacggatatgagtgcgagtggcgatacaactcttgtgctccggcctgccaggtgacttgtcagcacccagaaccgttggcatgtccggtacagtgcgtggaaggttgtcacgcccactgcccccctggaaagattctggacgaactcctgcagacttgtgtggaccccgaggactgtccggtgtgcgaagtggccggtcgcagattcgcgagtggaaaaaaggtgaccctcaacccctccgaccccgagcactgtcagatctgccactgtgacgtcgttaatctcacctgcgaggcctgccaggaacctggggggctggtagtgcctcctactgacgcaccagtcagtccaactaccttgtacgtcgaggacattagtgaaccgcccctgcatgacttctattgctctcgactcttggatctggtttttctcctggatggcagttcacgcctgtctgaggcagagttcgaagtcctgaaggctttcgtggtagatatgatggagagactcaggattagtcagaaatgggtcagagtcgctgtcgtggagtaccacgacggctctcatgcttatattggactcaaggaccggaaaaggccttcagagttgagaaggatcgcgtctcaggttaagtatgctggttcacaagtggcatccactagcgaggtacttaaatatactcttttccaaattttctccaagatagatagacccgaggcttctaggatcacgctgctgctgatggccagccaggagccacagcggatgtctagaaattttgtgcggtacgtgcagggccttaagaaaaaaaaggtcatcgtcattcccgtaggcattggtcctcacgctaatctgaagcagattcgcctgatcgaaaagcaagcaccagagaacaaagcatttgtcctcagcagcgtggacgagctggagcagcaaagggatgagatcgtgagttatctttgcgatctcgccccggaagctccgccccctacgctcccccccgacatggctcaagttactgtggggcctggtctgctcggtgtgagtaccctgggccccaaaagaaactcaatggtgctcgacgtcgcctttgtcctggaagggagcgacaaaatcggagaggccgacttcaacagatccaaggaattcatggaggaagttatccagaggatggatgttggtcaggattccatacatgtgactgtgctccagtactcctacatggttaccgtagagtatccattctctgaagcacagtctaagggtgatattctccaaagagtccgagagatccgctatcaggggggcaatcgcaccaacactgggttggccctccgctacctgagtgaccatagtttccttgtatcacagggagaccgcgagcaagctcctaacttggtttatatggtgacaggcaaccccgccagcgatgagatcaagcgcctcccaggcgatatccaggtggtgccaattggagtaggccctaatgccaacgtgcaggagctggagaggatcgggtggcccaacgcccccatactcattcaggattttgaaacgcttcctcgagaggcaccagacctggtcctgcagaggtgctgttccggtgaaggactgcaaatacccaccctgtctcccgcccctgattgcagtcagcctctggacgttatcctcctgttggatggatccagtagctttcccgcttcttacttcgacgagatgaaatcattcgcgaaagcgttcatctccaaggccaacataggccccagactgacgcaggtctctgttttgcagtacggctcaatcaccaccattgacgtgccctggaacgtggtgcctgaaaaggcacatttgttgagcctggtggatgtcatgcaaagggaagggggcccttcccagataggggacgcactcggatttgcggtgcgatacctgacgtccgagatgcatggggcccgaccaggcgccagtaaagccgtagtgatactggtgacagacgtctcagtggactctgttgatgctgccgcagatgcagcccgctctaatcgggtcactgtcttccctattggcataggtgaccggtacgatgcggctcagctcagaatactggccggaccggccggtgattccaacgttgtgaaattgcagagaatcgaggacttgccaaccatggtgacacttggaaattcttttcttcataagctctgcagtggatttgtgcggatttgcatggacgaagacggaaacgaaaagaggcctggggacgtgtggactttgcctgaccaatgtcacacagtgacctgccaacccgacggccagactttgctcaagagccaccgcgtgaattgtgacaggggcctgaggccaagttgccccaatagccagtccccagtgaaggttgaggaaacatgcggatgtagatggacatgtccctgtgtgtgtaccggaagctctactagacacatcgtgacttttgacgggcagaacttcaaactgacaggcagctgttcttacgtgctgttccagaacaaagaacaggaccttgaagtgatccttcacaacggagcttgctctccgggcgctagacagggttgcatgaaatcaatcgaggtgaagcattccgctttgtctgtcgagttgcactccgacatggaggtaaccgtgaatgggcgcttggtaagtgtgccttatgtcggagggaatatggaggtgaacgtgtatggggccatcatgcatgaggttagattcaatcatctgggacacattttcacattcacaccacagaacaacgagtttcaactccagcttagcccgaaaactttcgcttcaaagacctatgggctctgcggcatctgtgacgagaacggggccaacgatttcatgctccgcgacggtactgtaactaccgattggaagactctcgtgcaggagtggaccgttcaacggcccggacagacctgtcagccgatactcgaggagcaatgcttggttcctgactccagtcactgtcaggtcctgcttttgcctctcttcgccgagtgtcacaaagtgctcgcccctgctacattctatgctatttgccaacaggacagttgccatcaggaacaggtgtgtgaggtaattgcaagctacgcacatctgtgtagaacaaatggcgtgtgtgtcgattggcggacgcctgacttctgtgctatgagttgcccaccatcactcgtgtacaaccattgtgagcacggctgtccaaggcattgcgacggcaacgtcagttcttgtggggatcacccaagtgagggatgcttttgtccgcctgacaaagtcatgctggaaggcagctgcgtcccagaggaggcttgcacccagtgtatcggggaggatggcgtccagcaccagttcctggaggcctgggtgcctgatcatcagccatgtcagatttgcacctgtctctctggccgaaaggtgaactgcacaactcagccctgcccaactgctaaagcccctacgtgtggcctctgtgaagtggcaagactgcggcagaacgccgaccaatgttgccctgagtatgaatgtgtttgcgaccctgtttcttgcgacctgccccctgtcccccactgtgagcgcggtctgcagccaaccttgacaaatcccggggaatgtcggcctaatttcacatgtgcttgccgcaaagaagagtgcaagcgggtaagcccaccctcttgtccaccccataggcttccaacacttaggaaaactcagtgttgcgacgaatacgaatgcgcttgcaactgcgtaaatagcaccgtgtcctgtccattggggtacctggcaagtaccgctaccaacgattgcggctgcacaactaccacttgcttgcccgacaaggtctgcgttcaccggtccacaatctatcctgtaggccagttttgggaagagggttgtgatgtgtgcacttgcaccgacatggaggatgccgtgatgggcctcagggtcgcccagtgcagtcaaaaaccatgcgaagattcctgtcgatcagggtttacttatgtcctgcatgaaggcgagtgttgtggccggtgccttccttctgcttgtgaggtcgtgactggctcaccacgcggagattcccaaagtagctggaagagtgtgggaagtcaatgggcctcacccgagaatccttgcctgatcaacgagtgcgttcgcgtgaaagaggaggtctttatccaacaaagaaacgtgtcctgtcctcaactggaggtgcccgtgtgcccctctggctttcaactgtcctgcaagacaagcgcatgttgccccagttgtcgatgcgagagaatggaagcttgtatgctgaatggcactgtcataggccctgggaaaacagtgatgattgacgtgtgcaccacctgccgctgcatggttcaggtcggtgttatctctggcttcaagttggagtgtcggaagaccacctgcaacccttgtccactgggatataaggaggaaaataacactggagagtgttgtgggagatgtctgcccacagcctgcactattcagctgcgaggaggccagattatgacactcaaacgggacgagacacttcaggatgggtgcgacacacacttctgcaaagtgaacgagcggggagaatatttttgggagaagagagttacaggatgccctccatttgacgagcataaatgtttggccgaagggggcaaaataatgaaaattccaggtacctgttgcgacacatgtgaggagcccgaatgtaatgacattaccgcgcggctgcagtatgtgaaggtaggtagctgcaagagcgaagttgaggtagatatccattactgtcagggaaaatgcgcatccaaagccatgtacagcatcgatatcaatgacgtgcaggaccaatgctcctgttgctctcccacacgcaccgaaccaatgcaggtggccttgcactgcactaatggcagtgtcgtctaccacgaagtgttgaatgcgatggagtgcaagtgctccccaaggaagtgtagtaaa

SEQ ID NO: 21410 - DNA, 8439 bp, synthetic construct
  misc_feature 1..8439: note = source = /note="Description of Artificial Sequence: Synthetic coding sequence"
  source 1..8439: mol_type = other DNA
atgatccctgctcgatttgccggggtacttcttgccctggccttgatcctccccggaaccctttgcgccgaagggaccagggggcgctcctctacagcacggtgttcgctcttcggatctgatttcgtcaacaccttcgatggtagcatgtacagctttgcaggatattgctcatacctgcttgctggggggtgtcagaaacggagtttcagcatcatcggagactttcagaacgggaagcgagtgagcctatccgtctatctaggagaattttttgacattcatctatttgtgaatgggaccgtaacgcagggtgaccagagagtgagtatgccttacgcttctaagggcctttaccttgagaccgaggcagggtattataaactcagtggagaagcatatggtttcgtagctcggattgatggctcaggaaatttccaagtgttgttgtcagacaggtactttaataagacctgtgggctctgcggaaactttaatatatttgccgaggacgactttatgacgcaggagggcaccctgacctccgacccatatgactttgcaaactcctgggccctgtcctctggagaacagtggtgtgagcgagcgtcaccaccctcttcaagctgcaacattagttcaggggagatgcagaaggggctgtgggagcagtgtcagctattgaagtccacatcagttttcgctagatgtcatccactggtggacccagagccctttgttgccctgtgcgaaaagaccttgtgcgaatgcgccggcggactcgagtgtgcatgtcccgcgcttctcgagtacgcaaggacttgcgcccaggagggaatggtgctctacggatggaccgaccactctgcgtgcagtcccgtgtgtcctgccggcatggagtatcgccagtgtgtaagtccttgtgccagaacttgtcaatcactccatatcaacgagatgtgtcaagagcggtgcgtggatgggtgctcttgcccagagggccagctcctggacgaagggttatgtgtggagtccacagaatgcccttgtgtgcactctggcaaacggtacccaccagggacgagtctgagccgcgactgcaatacttgtatttgccggaattcccagtggatttgctcaaacgaggagtgccctggtgagtgtttggtgacagggcagtctcacttcaaatccttcgacaatcgttacttcactttctccgggatatgccagtatctattggcccgggattgtcaggatcattcgttcagtatcgttattgagacggtccaatgcgccgatgaccgtgatgctgtttgtacacgcagcgtgaccgtgaggttaccaggacttcacaatagcctggtcaaactgaagcacggcgctggcgtagcgatggacggacaggacgtgcagcttcccctgctgaagggcgatctgaggatccagcacaccgtaactgcttctgtccgtttaagctatggtgaagacctacagatggactgggatggacggggacggttactcgtcaaactctccccagtatacgccggaaaaacatgtggcctttgtgggaactataacggcaaccagggagacgacttcctgacccccagcggtcttgcagagccaagggtggaggatttcggaaacgcctggaaacttcacggagattgccaagacctacagaagcagcactccgacccctgtgcactgaaccctcggatgacccgattctctgaggaggcctgcgcagtactcacgagcccgacttttgaggcctgccaccgcgccgtgtcccctctgccttacctaagaaattgccgctacgatgtatgtagttgctctgatggtcgtgaatgtctgtgtggggctctggcaagctacgccgcagcgtgtgcaggtcgaggggtccgtgtcgcttggcgagagccagggcggtgcgaattgaattgccccaaaggacaggtgtatctgcaatgcggtacaccctgcaacttaacttgcagaagcctctcgtatcctgacgaagaatgcaatgaggcatgtctggagggctgcttctgccctcccggtctgtacatggacgagaggggggattgtgtccccaaggctcagtgcccatgttattacgacggggaaatcttccaacctgaggacatttttagtgaccaccataccatgtgctactgtgaggatggttttatgcactgcacgatgtccggtgtgccaggttccttgcttcctgatgcagttctaagcagtcccctaagccatcggtctaagcggagtctgagttgccgcccccccatggtgaagctcgtctgcccagcggacaacctgagggccgaaggcctggagtgcacaaaaacctgtcagaactatgatctggaatgcatgtccatgggatgcgtttccggctgcttgtgccctccaggaatggtccgccatgagaacaggtgtgtagccctggagagatgcccatgttttcaccagggcaaagaatacgctcccggcgagacagtcaaaatagggtgcaatacctgtgtctgccaggatcggaagtggaattgcacagaccacgtctgtgacgccacatgtagcaccattggcatggctcactatctaacattcgacggcctgaagtatctatttcccggggaatgccagtacgtactggtccaggattactgcggctctaatccagggacatttcgaattctagtgggaaacaaagggtgcagtcatccttctgtcaagtgcaagaaaagggttaccatcctggtggagggtggcgagatcgagctctttgatggtgaagttaacgttaagagacccatgaaggacgaaacccatttcgaagtggtagagtcaggacgctacattatacttctgttgggcaaggccctatcagtcgtgtgggaccgccacctgtctatatctgtggttttgaagcagacgtatcaggagaaagtctgcgggctatgcgggaacttcgatggcattcagaataatgatctgacctccagcaatctgcaggttgaggaggaccccgtcgacttcgggaactcctggaaggtctccagccagtgcgcagacacccggaaagttcctctggatagcagtccggcaacctgtcataataatataatgaaacaaactatggtggacagctcctgcagaattctcacttccgacgtgtttcaggattgcaacaagctggtagacccggagccatatctggatgtgtgtatttacgatacctgctcctgcgaatctattggtgactgcgcatgcttttgcgacaccatcgccgcttacgcccacgtctgtgcacagcatggcaaagtcgtgacctggcgcacggctacattatgcccccagtcttgcgaagaacggaacctgcgggagaatggctatgagtgtgaatggagatacaattcctgcgctccggcttgccaggtaacatgccagcatcctgagcctctagcctgtcctgtgcagtgtgtggagggctgccacgctcactgccctccaggtaagattttggacgaactcctgcaaacttgtgttgacccagaggactgtccggtctgtgaggtcgctggtcggaggttcgctagcgggaaaaaagtcactctgaacccaagcgacccagagcattgccagatctgccattgtgatgtggtgaatttgacatgcgaagcctgccaggaaccaggcgggttggtcgtccccccgactgatgccccagtcagcccaacaactttgtacgttgaggatatttcagagccacctctgcacgacttctattgttcgcgactgctggacctggtgtttctgctggacgggtctagccgtctcagtgaggctgaattcgaggtacttaaagcctttgtggttgatatgatggagcgcctgcgaatcagtcagaagtgggtaagagttgccgttgtggaataccatgatgggtctcacgcgtacatcgggctaaaggacagaaagaggccctccgagctgagacgcattgcctcacaggtgaagtacgccgggtcgcaggtcgcgagcacctccgaggtcttgaagtacactttgttccagattttttctaaaatcgatcgtcccgaggcctcgagaattacattgctactcatggcgtctcaagagccacaacgcatgagcagaaacttcgtgaggtacgttcagggactgaagaagaagaaagtgatcgtgatccctgtgggtattggcccacacgctaatctcaagcaaatcagactgatcgagaagcaggccccagagaacaaggcatttgtccttagttcggtcgacgagctcgaacagcagcgcgatgagatcgtcagttacctctgcgatctggctcccgaagcaccccctccgaccctccctcccgacatggcccaggtcacagtcggtcccggcttattgggcgtgtcgacactgggccccaagaggaactctatggtattggatgtggccttcgtattggaaggatctgacaaaattggggaagccgatttcaatcgttctaaggagttcatggaggaagttatccagaggatggacgtaggtcaggatagtattcacgtcaccgtgctgcagtactcttatatggtgactgtggagtaccccttctccgaggcccagtcgaagggagatatcctccagagggttcgcgaaattcggtatcaggggggcaatcggaccaacaccggccttgcactacgttacctgagtgaccatagctttcttgtgtctcagggagacagggagcaagctccgaatctggtgtacatggtcactggcaatcccgcaagtgacgaaataaaaaggttgcccggggatattcaagtggtgccgatcggggtcgggcccaatgctaacgttcaggaactcgaaaggattggctggcctaatgctccgatcctaatacaggattttgaaacactaccacgggaggcgcccgatctggtgctccagcggtgttgctctggagagggacttcagattcctactctcagccctgcccccgactgctcccaacccctcgacgtgattctgcttttggacggctcttcctctttccccgctagctacttcgacgaaatgaagtcattcgcaaaagcctttattagcaaggccaatatagggccaagattaactcaagtgagcgtgcttcagtatggatctatcactactatagacgtgccttggaacgtggtgcccgagaaggcgcatttactctctttggtagacgttatgcaacgtgaagggggaccttcccagattggcgacgctctcgggtttgccgtgcggtatttgacctcggagatgcatggagctagacccggagcttctaaggcagtcgttatcctcgtgacggatgtctcagtggactcagttgatgccgccgctgacgccgctcggtctaaccgggtaacagttttcccaatcgggatcggcgaccgctacgacgccgcccaacttcgcatccttgccggacctgccggggactccaatgtcgtgaagctgcagcgtatcgaggatttacccaccatggtgacactgggtaactcatttctgcacaagctctgcagcggatttgtgcgaatctgcatggatgaggacgggaatgagaaaaggcccggtgacgtttggactctccctgaccaatgtcataccgtcacctgtcaaccggatgggcaaactctgttgaagtcacacagggtgaactgcgacagaggcctgcggcctagttgccccaacagccagtcacccgtgaaggtcgaagagacttgcggctgtcgatggacctgcccctgcgtctgtacaggcagctcgacccgacacattgtgacttttgacgggcagaatttcaagctgaccggaagctgctcatatgtacttttccagaacaaggagcaggacctcgaagtgattttgcacaacggtgcctgctcacccggcgctaggcagggttgtatgaagtcaatcgaggtgaaacactcagcactttccgtggaactccatagtgacatggaagtgactgtaaatgggcgtctcgtgtctgtgccctacgtcggcgggaacatggaggtgaatgtgtatggggcaattatgcacgaagtaagatttaatcatctcggccacatcttcacctttacccctcagaacaatgaatttcagcttcaattgtcaccgaagaccttcgcctctaaaacttacgggctatgcgggatctgcgacgagaatggggccaacgatttcatgctgagagacggcacggtgacgactgattggaaaaccctggttcaggaatggactgtgcagcggcccggacaaacatgccagccaattctggaggaacagtgcctggtgccagattcatcacactgtcaagttctgctgttgccgctcttcgccgagtgtcacaaggtccttgctcctgccacgttttatgccatctgccagcaggactcttgccaccaggagcaggtgtgcgaggttatagccagctacgcacatctgtgccgaaccaatggggtatgcgtggattggaggacaccagatttttgtgcgatgagttgtccgccttctttggtgtacaaccactgtgaacacggttgcccacggcactgcgatggcaacgtaagtagctgcggtgaccacccgtctgaagggtgtttctgcccccctgataaagtcatgcttgagggaagctgtgtccccgaggaggcttgcacccagtgtatcggcgaagatggggtgcagcaccagttcctggaagcttgggtgcctgatcaccagccttgtcagatctgtacctgcctgagcgggagaaaggttaattgtaccacacagccctgccctactgctaaggctccaacatgcgggctctgcgaggttgcacgcttgaggcagaatgctgaccagtgttgtccagaatatgaatgtgtgtgtgatccagtgtcctgcgacctgccacccgtgccacattgcgaacgaggcctgcaacccaccttgacaaaccctggcgagtgcaggccaaacttcacttgcgcctgtcggaaagaggaatgtaagcgtgtatcgccgccaagctgcccaccacaccggctcccaaccttaaggaagacacagtgttgcgatgagtacgagtgcgcttgcaactgtgtgaatagcaccgtgtcctgcccactcggatacctcgcgagtacagccacaaacgattgcggttgcactaccaccacttgtctcccagacaaagtctgtgtgcatcgctcaacaatatatcccgtcgggcagttctgggaggaagggtgtgacgtttgtacatgtacagacatggaagacgcagttatgggtctgcgagtcgcccagtgctcacagaagccatgtgaggatagctgccgctcaggttttacctacgtcctacacgaaggagagtgctgtggcaggtgcttaccttcagcctgtgaagtcgttaccggcagccctcgtggggactcgcagtcaagctggaagtcagttggtagtcagtgggccagcccagaaaacccctgcttgattaatgagtgcgtgcgggtgaaagaagaagtattcattcagcagcgtaatgtgagttgcccgcagctggaggtccccgtctgcccaagtggatttcaattgtcatgcaagacttccgcatgttgtccatcttgtaggtgtgagcgtatggaagcatgcatgctgaacggaacagtcataggcccaggcaagaccgtcatgatcgacgtttgcactacatgtcggtgcatggtgcaagtgggtgtgatttcagggttcaagctggagtgtcggaagaccacctgtaacccttgtccacttggatacaaagaggaaaacaacaccggcgaatgctgcggtaggtgtctacccaccgcctgcacaatccagctgcgaggtgggcaaatcatgaccctaaagagggatgagacactccaagatgggtgtgacacccacttttgtaaggtgaatgaaagaggggaatatttctgggagaagagagtgaccggttgccctccttttgacgagcacaagtgtctcgcggagggaggtaaaattatgaaaatcccaggtacttgctgtgatacatgcgaagagcctgagtgcaatgatatcacggcgcgtttacagtatgtgaaagtgggttcttgtaagtccgaagtggaagtagatatccactattgccagggtaagtgcgcctctaaggcgatgtactctattgacattaacgacgtgcaggaccagtgtagctgttgctctcctacccggacagagcctatgcaggtggctcttcactgcaccaacggcagtgttgtgtaccacgaagtgctgaacgccatggaatgtaagtgctccccgagaaagtgtagcaag

SEQ ID NO: 21411 - DNA, 8439 bp, synthetic construct
  misc_feature 1..8439: note = source = /note="Description of Artificial Sequence: Synthetic coding sequence"
  source 1..8439: mol_type = other DNA
atgatacccgcaagattcgcgggagtgctgcttgctctggcactgatcttgcctgggactctatgtgctgaggggacacggggccgcagctccaccgcaagatgctcactgtttgggtctgattttgtgaacaccttcgatggctccatgtattcgttcgctggatactgctcctacctcctcgcagggggctgccaaaaacgctcgttctcaatcattggggacttccaaaatggaaaaagagtctccctgagcgtctacctgggcgagtttttcgatattcatctctttgtgaacgggactgtaacccagggcgaccagcgcgtgtcaatgccttatgcctcgaagggcctttatctggagactgaggccgggtactataaactgtcaggggaagcttacggcttcgtggcccgcattgatggatccgggaattttcaagtcctgctgtcagatagatatttcaacaaaacctgcggcttgtgtggcaacttcaacatatttgcagaggacgacttcatgactcaggagggaacccttacttcggacccttacgatttcgcaaacagctgggctctttcgagtggagagcagtggtgtgagcgagcctcccccccatccagctcgtgcaatatatctagcggcgagatgcagaagggtctttgggagcagtgccaactcttgaaatcaacctctgtatttgccagatgtcatcccttggtggatccagagccgttcgttgcgttgtgtgaaaaaaccctgtgcgagtgcgcaggcggcctggagtgtgcctgtccagccctcctcgagtatgctaggacctgtgcccaggagggcatggtgctttacggatggaccgatcactcagcttgcagtccagtgtgtccagcggggatggagtatcgacagtgcgtttccccatgcgctaggacctgccagagtttgcatattaacgagatgtgccaggaaagatgcgttgatggatgcagctgtcccgagggacagcttcttgacgaaggactttgcgtggaatctacggagtgtccttgcgtgcactctggtaagcgttacccaccaggcaccagcctttcgagggactgtaacacttgtatctgtcggaatagccagtggatttgtagtaacgaagagtgcccgggtgaatgtctggtgactggccagtcccattttaaatcttttgataacagatacttcaccttctctggaatctgccagtacctcctcgcccgcgattgccaggaccactcgttctccatcgtcatcgagactgtgcagtgtgccgacgatcgagatgctgtgtgcactcggtcagtcaccgtgaggttgcctggcttgcacaactccctagtgaagctaaagcacggcgctggcgtagcaatggatggccaggacgttcagttgcccttactgaagggcgacctcaggattcaacatacggtcactgcctcggttaggctctcatatggtgaagatctccagatggattgggacggacgggggcgactgctagtgaagctgagccctgtttacgcagggaagacttgtggtctgtgcggcaactataacggaaaccagggggacgacttcctgaccccttccggcctcgccgagcctcgcgtggaagatttcggcaacgcctggaagttgcacggagactgtcaagaccttcagaaacagcacagcgacccctgcgctctcaaccccaggatgacccggttctctgaggaggcctgcgcggtccttacctcccccaccttcgaagcctgccaccgcgccgtatccccattgccgtaccttcgcaattgtcgatatgacgtgtgtagctgtagcgatgggcgggaatgcttatgcggggccctggcctcttatgcagctgcctgcgcgggtaggggtgtgcgggtggcatggagagaaccgggtcgctgcgaactgaattgtccaaagggccaggtgtacctccagtgcggcactccatgcaacttaacctgtcggagtttgtcttatcctgacgaagaatgtaatgaggcatgcctcgaaggatgtttctgcccgcctggactatatatggacgaacgaggagattgtgttccgaaagctcagtgtccgtgctattacgacggtgaaatattccagcctgaggatattttctccgatcaccatacgatgtgttactgcgaagatgggtttatgcattgcactatgagtggggttcctggctcgctgctgcctgacgcagtgctgtccagtccactatcgcatcggtccaagaggagcttgtcttgccggccccccatggtgaaactcgtgtgccccgctgataatctacgtgcggaaggcctcgagtgcaccaagacatgccagaactacgatctggagtgtatgagcatggggtgtgtgtcaggctgtctgtgtccccccggtatggtcagacacgagaataggtgtgttgcactggagagatgcccctgcttccatcagggcaaagaatatgccccgggggagaccgttaagattggttgcaacacttgtgtctgtcaagaccgcaaatggaactgcaccgaccacgtctgtgacgcgacttgtagcaccattgggatggcgcactacctaacattcgacgggcttaaatatctgttccctggggagtgtcagtacgtcctagtccaagattactgcgggtctaacccgggaacatttcggatactcgtgggcaataaggggtgcagccacccttcggttaaatgtaaaaagcgggtgactatccttgtcgaaggcggtgaaatcgaactgttcgatggtgaggtgaatgtcaagaggcctatgaaggatgaaacccacttcgaggtggtcgaatcggggaggtacattatactcctgctggggaaggcactgtctgtcgtttgggacagacacttgtccatctccgttgtgcttaaacagacttatcaggagaaggtctgcgggctctgcggcaactttgacggaattcagaacaatgacttgacttcatcgaatctgcaggttgaggaggacccagtcgatttcgggaatagttggaaggtgagctcgcagtgcgcagacacacggaaagtgcctctagacagtagcccagctacatgtcacaacaatatcatgaagcagacaatggtggattccagttgccggattcttacctctgacgtgtttcaggactgcaacaaactcgtagaccctgaaccctatctggatgtctgcatatatgacacctgttcttgcgaaagcattggagattgcgcctgtttctgcgatacaattgccgcatatgcccatgtctgtgctcagcacgggaaggtagttacatggaggacagccaccttgtgcccccagagctgtgaggagaggaatctacgcgaaaacggatacgagtgtgaatggagatataattcatgtgcccccgcctgtcaggtaacctgtcaacatcctgaacccctggcgtgccctgtgcagtgtgtcgagggttgccacgcccattgcccgcccgggaagatactggatgagctgctacagacatgtgtggatcctgaagactgtccagtatgtgaggtggctggtcggcggtttgcgagcggaaaaaaggttaccttaaacccatcagatccagaacattgccagatctgccattgtgatgtggttaatctgacctgcgaggcatgccaagagcctggtggcctcgtggtcccacctaccgacgctcccgtttctcccactactttgtacgtagaggatatatcagagccacctctacatgacttttattgcagccggttgctcgacctcgtttttctccttgacggatcttctcggttatccgaggccgaatttgaagtcctcaaagcatttgtggtggatatgatggagcgtttacgcatctctcagaagtgggtgcgtgtggcggtcgtggagtaccacgacggtagtcatgcctatattggcttgaaggatcggaaacgccccagtgagctcaggcgtatcgccagccaggtgaaatacgctggaagccaagtggcctcaacctctgaggtgctcaagtatacattgtttcagattttcagtaagatcgaccgacccgaggcctcccgcatcacactgctgttgatggcatcacaagagccgcagaggatgagtcgaaacttcgtgagatatgtgcaggggctgaaaaagaaaaaggtgatcgtgattccagtcggtatcggacctcacgctaatctaaagcagatccgtctcattgaaaaacaggctccagagaacaaggcctttgtgctttcctcggtcgatgaactggagcagcaacgcgatgaaattgtaagctatctctgtgacctggccccggaagcgccaccccccaccctgccaccagacatggcacaggtaacagtcgggccaggcttacttggtgtgtccactcttggacctaagcgcaactctatggtattagatgtcgccttcgtgctggagggaagtgacaaaatcggtgaagccgattttaatcgctctaaggagtttatggaagaggtcatccagagaatggatgtcgggcaggatagcatccatgtcactgttctgcaatatagttacatggtgactgtcgaatatcctttctccgaagcccagtccaagggcgacattttgcagagggtgcgcgaaattcggtaccaggggggtaatcgcactaatacaggcctggcactcaggtatctgagcgaccatagcttcctggtgagtcagggggaccgcgagcaggcaccaaacctggtctatatggtgactggtaaccccgcgtccgacgaaattaaacggctgcctggcgatatacaagtcgtgcccattggcgtgggacctaatgccaacgtgcaagaactggaaagaataggttggcccaacgcccccatactgatccaggacttcgagacgttgcccagggaagcccccgatcttgtcctgcagaggtgctgctcaggcgagggtcttcagatccccactttaagtcccgcccccgactgtagccaacctctggacgtgattctgcttcttgatggatcgagctcattccctgctagctatttcgacgagatgaaatcattcgctaaggctttcatctccaaagccaatatagggcccaggctgacacaggtaagcgtgttgcagtacgggtcaattaccacaattgacgtgccttggaatgtggtgccggaaaaagcccacctgctaagcttagtggatgtcatgcaacgcgagggcggcccctcgcaaattggggatgccctaggatttgctgtgcgttacctcaccagcgagatgcacggcgcccgacccggtgcgagtaaggctgtggtgattctggttacagacgtcagcgtggactccgtggacgcagcggctgacgcggctaggtcaaaccgagtcaccgtgttcccaataggtattggcgaccgctatgacgccgctcagcttagaatcttggccggcccggccggggattctaacgtcgtcaaactgcagcgcatagaggatcttcctaccatggtgactttgggtaactcctttttacacaaactgtgttctgggtttgtgagaatttgcatggatgaagatggtaacgagaaacgtccaggtgacgtatggacacttccagatcagtgccacaccgtgacgtgccaacctgacggtcagactcttctgaagtcgcaccgcgttaactgcgaccggggcttgcgaccctcatgcccaaactcccagagcccggtgaaagtggaagaaacctgtggctgtcgatggacttgcccctgtgtgtgtactgggagctccacccggcacatcgtgacatttgacggccagaacttcaaactgactgggagttgtagctacgtgttgttccagaataaagaacaggatctcgaagttatcctacataatggggcgtgcagccctggggcacggcagggctgtatgaaatcgattgaagtgaagcactcagcgctgtcagtagaactacatagtgacatggaggtcactgtgaatggcagactggtctctgtgccgtacgtgggagggaacatggaagttaacgtttatggggccattatgcatgaagtgagattcaatcacctgggccatattttcactttcaccccacagaacaacgaatttcagctgcagctttcacccaagacgtttgcctctaaaacgtatggcctgtgtggtatttgcgatgagaacggcgctaacgacttcatgttacgggacgggaccgtgaccaccgactggaagacgttagtgcaagaatggacagttcagcgtccaggccaaacctgccaaccaattctggaagaacagtgtcttgtgccagatagttctcactgccaggtactgctcctgcccctgttcgccgagtgccacaaggtcctggctccggcaaccttttatgccatatgccaacaggacagctgccatcaagagcaagtctgcgaggtcatcgcttcctatgctcatttatgtaggactaatggcgtgtgcgtcgactggagaacgccagatttttgtgctatgagctgcccacccagtctggtgtataaccactgcgagcacgggtgccccagacattgcgacggcaacgtcagtagctgcggcgaccacccttcagaaggctgtttctgccccccagacaaagtgatgctcgaaggaagctgtgttcccgaggaggcctgtacacaatgtataggtgaggacggggtccagcatcagttcctagaagcgtgggtgcctgaccaccagccatgccagatatgcacatgtttgagcggtcgcaaagtgaactgcaccacacagccgtgccctaccgcgaaggctcctacctgtggcctctgtgaggtagcccggctgaggcaaaacgccgaccagtgctgccccgaatatgagtgtgtgtgcgatccggtgtcatgcgacctgcctccagtgcctcactgtgaaagggggttacaacccacattaacgaatcctggcgaatgtagaccgaacttcacatgcgcttgtaggaaggaggagtgcaaacgcgtctcgcccccttcttgtcctcctcacaggttacccactctcagaaagactcagtgttgtgatgagtatgaatgcgcatgtaactgtgttaactctactgtttcctgtcccctgggttatttggcctcaaccgcaacaaacgactgtggctgcaccactaccacgtgcctgcctgataaagtgtgcgtgcataggagcaccatttacccagtggggcagttctgggaggaaggctgcgacgtgtgtacctgtaccgatatggaggacgccgttatggggctccgtgtcgcccagtgctcccagaaaccctgcgaggacagctgccgttctggctttacatacgtgctacatgagggcgagtgctgcggaaggtgtcttccatcggcttgcgaagttgttaccggctcccctcggggggactcccagtcttcctggaagtccgttggatcacagtgggccagtcctgaaaacccgtgcctcattaacgaatgtgtgcgcgtgaaagaggaagtcttcattcagcagcgcaacgttagttgtcctcagctggaggtgcctgtgtgcccaagcggcttccagctgtcttgcaagaccagtgcctgttgcccctcttgtcggtgcgagcggatggaggcctgtatgctcaatggcacagtgattgggcccggaaagactgtcatgattgatgtgtgcactacatgtaggtgtatggtccaggttggcgtaatctctggcttcaagctggagtgccggaaaacgacatgtaacccatgccctcttggatataaagaggaaaacaatacaggagagtgctgtgggcgctgtctgcccaccgcctgcaccatccagcttagaggcggtcagatcatgacacttaagcgggacgagaccttacaggatggttgcgacacccatttctgcaaggtgaacgaacgcggcgaatacttttgggagaagcgagttaccggctgtcccccttttgatgagcataagtgcttagctgaaggtgggaaaattatgaaaattcctggtacctgttgcgacacctgcgaggaaccggaatgtaacgacatcactgcacggttgcagtatgtaaaagtcggctcgtgcaagtcagaggtggaagtcgacattcattactgccagggaaagtgcgcgtcaaaagccatgtattcaatcgacatcaacgatgtgcaggatcagtgtagctgctgtagtcccaccaggacagagcccatgcaggtggccctgcactgtacaaatggcagcgtggtgtaccatgaagtgcttaacgccatggagtgcaaatgctcacccaggaaatgctcaaaa

SEQ ID NO: 21412 - DNA, 8439 bp, synthetic construct; identical to SEQ ID NO: 21386
  misc_feature 1..8439: note = source = /note="Description of Artificial Sequence: Synthetic coding sequence"
  source 1..8439: mol_type = other DNA

SEQ ID NO: 21413 - DNA, 8439 bp, synthetic construct
  misc_feature 1..8439: note = source = /note="Description of Artificial Sequence: Synthetic coding sequence"
  source 1..8439: mol_type = other DNA
atgattcctgcccgctttgccggcgtattgctcgccctggctctgatcctgcctgggacactctgcgcagagggaacacgaggcaggtcaagcaccgcccggtgttcactcttcgggtccgactttgttaatacattcgacggcagcatgtattccttcgctggctactgcagctacctgctggccggtggatgccagaagaggtctttcagcattatcggcgactttcagaatgggaaaagagtgagcctgtcagtctacctaggggaatttttcgatatccatctgtttgtgaatggcaccgtgacccagggggatcagagggttagtatgccctacgcaagcaaaggattatacctagagaccgaggccggttattataaattgtctggcgaggcctacggcttcgtggctaggatagatgggtctgggaatttccaggtactgctttctgaccgctattttaacaaaacctgtggtctctgcggcaattttaatatcttcgccgaagatgacttcatgacccaggagggtacactgacaagtgacccatatgacttcgcaaactcttgggcactaagcagtggcgagcagtggtgtgaaagggccagtccaccctcgtcctcatgtaatatcagtagtggggaaatgcaaaaagggctttgggaacagtgtcagctcctcaagtccacctccgttttcgctaggtgtcatcctctagtggatcccgaaccttttgtggcgttgtgcgaaaaaactctgtgcgaatgtgccggagggctcgagtgcgcttgccctgctctcctagaatatgctcggacttgtgcgcaggaagggatggtgttgtacgggtggacggatcacagcgcatgcagtcccgtctgccccgctggcatggagtatcggcagtgtgtgtccccgtgtgcccgcacctgtcaaagccttcacatcaacgaaatgtgtcaggaaaggtgcgtcgatggttgctcatgtccggaaggacagttgctagatgaaggactctgcgtggagagcactgagtgcccatgcgtccactccgggaagcgatatccacccggaacctctcttagcagggactgcaatacttgcatctgccgaaattcccagtggatctgcagtaatgaggaatgcccgggagaatgtctggtgaccgggcagtctcattttaaaagttttgacaacagatactttactttctctggcatctgtcagtacctgctcgctcgcgactgtcaggatcactcgttctcaattgtgatcgagaccgtccaatgcgccgacgaccgtgacgccgtttgcacgcgttctgtgaccgtcagactgcctggtctgcacaactccttggttaaactgaaacatggcgcgggagtggccatggacgggcaggatgttcaattgccactgttgaagggagacttgagaatccaacacaccgtaacagccagcgtgcgtttatcttacggggaggatctgcagatggactgggacggcagaggccgacttctggtgaagctgtcacctgtttacgcaggtaagacttgtgggctatgtggaaactacaatggcaaccaaggtgatgactttctcactccgtcaggcctcgctgagccacgtgtcgaggattttggcaatgcgtggaagctgcacggcgattgccaggatctgcagaagcagcacagcgatccttgcgccctgaatccccggatgacacgcttctctgaagaggcttgcgcagtgctgacgtctcccaccttcgaagcctgccaccgagctgtctcgcctcttccctacctgcgaaattgcaggtacgacgtgtgtagctgctcagatggaagagagtgtttatgtggcgcgttagcttcatacgcagctgcctgcgcaggacgcggggttcgggtggcctggcgcgagcccggccgctgcgaactgaattgtccaaagggtcaggtctatctgcagtgtggaactccctgtaatctcacatgcagaagcctgagctaccccgatgaggaatgcaacgaggcatgcctcgagggctgcttctgcccgcccggactgtacatggacgagcgcggcgactgtgttcctaaggcacagtgcccttgctattatgacggagaaatctttcaaccagaagacatcttctccgaccaccatactatgtgttattgtgaggacgggttcatgcactgcacaatgtccggcgtgcctggttctctactgcccgacgccgtactgagctcgcctttgtctcatagatctaagcggtccctaagctgccgaccaccgatggtcaaactggtgtgtcctgccgataacttgagggctgaagggctcgagtgtacaaagacatgtcagaattacgacttagagtgtatgtccatgggctgcgtctctggttgcctatgcccacctggcatggtacgacatgaaaatcggtgtgtggccctggaaagatgcccctgcttccaccaaggtaaagaatatgcccctggggagactgtgaagattggctgcaacacctgcgtgtgccaggaccggaagtggaactgcaccgatcacgtctgtgatgcaacttgctctacgatcggcatggcccactacctaacattcgacggtctgaaatatctgtttccaggagagtgtcagtacgtgctggttcaggattattgtgggtccaacccagggacctttcgtatactggtgggtaacaagggctgcagtcatccctcggtcaagtgcaaaaaacgggtcacgatccttgtagaaggcggggagatagagctctttgacggtgaggtaaacgttaagaggccaatgaaggatgaaacccattttgaggtggtggaaagtggcaggtatatcatcttgctcctgggtaaagctctttccgtcgtgtgggatcggcacctctcgatcagtgtcgtgctgaagcagacctaccaggaaaaggtctgcggtctctgcggaaacttcgacgggattcaaaataacgatctcacgagcagcaatctgcaggtggaagaggatcccgtggactttgggaatagctggaaggtttcaagccagtgtgctgatacgcgaaaggtaccccttgattcctcgcccgctacctgccataataacattatgaaacaaacaatggtcgactccagctgtcgcatcttaacatcagatgtgtttcaggactgcaataagctcgtggacccggagccttatctcgatgtgtgcatctatgatacatgctcttgcgagtcaatcggggattgtgcatgcttttgcgatacgatcgccgcatacgcccacgtatgcgcacagcacgggaaagtcgtcacttggagaactgctacactttgcccccagagctgcgaagagcgcaatctgagggagaacggttacgagtgcgaatggcgttataactcctgcgcgccagcctgccaggtgacatgtcaacatcctgaacccctcgcatgccccgtgcagtgcgtggagggctgtcatgcccactgccctcctgggaagatacttgacgaactcctgcagacatgcgtcgatcccgaggattgtcccgtttgcgaagtcgcgggccgaagatttgccagtggcaagaaggtcactctcaatccatccgacccagagcactgtcagatctgccactgcgatgtggtgaacctgacttgtgaggcctgtcaggaacccggcgggttggtggtaccaccaaccgatgcccctgtgtctcccacaacactgtatgtcgaggacatcagcgagccgcctctccacgacttctactgctcccgcctgttagatttggtgtttctgcttgacggttctagcaggctgagcgaggccgagtttgaggttttaaaagcctttgtcgtggacatgatggagaggttgcggatcagccaaaagtgggtgagagtcgccgtggtggaataccatgacggaagccacgcctatattggcctaaaggaccgaaaaagacccagtgaactgcgtcgcatcgcaagtcaggtcaagtacgcgggcagtcaagtggccagcaccagcgaggtgctaaagtacaccctcttccaaatattcagtaaaattgaccggcccgaagcaagtaggataactctcctgctgatggcaagccaggaaccccaacggatgagtaggaacttcgtgcgttacgtgcagggccttaagaagaaaaaggttatcgtcatccctgtgggtatcggtccccatgcaaatctgaaacagattagactcattgagaagcaggccccggaaaataaggctttcgtgctgtcctctgtcgacgagctggagcagcagcgggacgaaattgtatcctatctatgtgatctcgcgcccgaggcccccccgcctactctgcctcccgacatggcccaggttaccgtggggccaggtctgttgggcgtcagcacactgggtcctaagagaaattccatggtccttgacgttgcgttcgtcctggaaggtagtgataaaatcggcgaggccgacttcaatagatcaaaagaatttatggaggaagtaatccagagaatggatgtgggccaggacagtattcacgtgaccgtgcttcagtatagctatatggtcacagtggagtatccattctccgaggctcagtctaagggcgatatcttgcagagggtcagagaaattcgctatcagggcggtaataggacaaataccggcctggctttgcgatatctgtctgatcattccttcctggtgagccagggcgatagggagcaggcgcctaatctggtctacatggttaccgggaatcctgccagtgatgaaatcaagcgattgccgggagatattcaggtggtgcccatcggcgttggcccaaacgccaatgttcaggagctggaaagaatcggatggccaaatgcacccatcttgatccaggactttgaaacactcccccgggaggcccccgacctggtgcttcaaaggtgttgctctggagaggggttacagatccctacgctcagccctgcacccgactgctcacagccacttgatgtgattcttctgctcgacgggagctcttcattcccagcctcctacttcgatgagatgaagagcttcgccaaggctttcatttctaaagcaaacataggccctagattaacccaggtgtctgtactccagtacggcagcatcacgacaattgacgtgccctggaacgtcgtgcccgagaaagcacaccttttgagcctcgtcgatgtcatgcagagggaagggggaccgtctcagataggggatgctctgggctttgccgtgaggtacctgacgtctgagatgcatggagccagaccaggggctagcaaagccgttgtcatcctagtcaccgatgtgtccgtagacagtgtggatgcagccgctgatgcggcaagatcaaacagggtcaccgtgtttcctattgggatcggagacagatatgacgcagctcaactcagaatactggccggtcccgcaggagattcaaatgtggtcaaactccagaggatcgaggatctgcccacgatggtgacccttggcaattcatttctccataaactgtgttccggctttgttaggatatgtatggacgaggatgggaatgaaaagcgccccggcgatgtatggacattgcccgatcaatgtcatacggtgacgtgccagcctgacggtcagacactattgaagtctcatcgggtgaattgtgaccggggactaaggccaagttgccctaactctcagtccccagtaaaggtcgaggagacatgcgggtgccggtggacctgcccatgtgtgtgtaccggatcctccacccgacatatagtgacgttcgatgggcagaacttcaagttgacgggtagttgttcatacgtgctctttcaaaataaggagcaagacctggaggtcatactccacaatggcgcgtgctcccccggggcacgtcaaggttgcatgaagagtattgaggtaaagcattcagcactgtccgtagagctgcacagcgatatggaggtgacggtgaacggacgcttggtttcagtgccgtatgtcggtggtaatatggaagtgaacgtttatggcgcaattatgcatgaggtcagattcaatcatttgggacacatattcacttttacccctcagaataatgagtttcagctgcagctatctccaaaaacgttcgcctccaagacatacggactttgtggtatatgtgatgagaacggggccaacgactttatgctgcgcgacggcacggtgacaacagactggaaaacacttgttcaagagtggactgtgcagcgcccgggccaaacctgccagcctattctcgaggaacagtgcctggtgcctgacagtagtcactgccaggtgttactcctgcctctctttgccgagtgccacaaggttctcgctccagctactttctacgcgatctgtcaacaggattcgtgccaccaggagcaggtatgtgaggttattgcaagctacgcccatctgtgtcgtacaaatggagtctgtgtcgattggcggactcccgacttctgtgccatgagttgccctcccagtttagtgtacaaccattgcgaacacgggtgtcctcgacattgtgatgggaatgtttcatcctgcggcgatcatccatcagaaggctgcttttgccctcctgacaaagtaatgctggaagggtcctgtgtgcccgaggaggcatgtacccagtgcatcggggaggatggcgtacagcatcagtttttggaggcctgggtgcccgaccatcagccttgccaaatatgcacatgccttagcggcagaaaggtaaattgtacaacccagccctgccccactgctaaggcaccgacctgcggcctctgcgaggtggcaaggctgcgccagaacgctgaccagtgctgtccagagtacgagtgcgtttgcgaccctgtgtcttgtgacctccctcccgtcccgcactgtgagagaggtctccaacccaccctgaccaaccccggtgaatgtcggcctaatttcacctgcgcatgtagaaaggaggagtgcaagcgtgtgtcgccaccgagctgccctccacatcgcctccccacgctccggaaaactcagtgctgcgacgaatatgagtgtgcatgtaactgcgtgaatagcacagttagctgtcccttgggctacctggccagcaccgctaccaacgattgcggatgtaccaccaccacctgtctacctgataaggtgtgtgtgcaccgctctaccatctatcccgtgggtcagttttgggaagagggttgcgatgtctgcacgtgtactgacatggaggatgccgtgatgggactgagagtagcccagtgctcacaaaaaccatgcgaggacagctgtaggagcggttttacatatgttcttcacgagggagagtgttgcgggcggtgtttgccatcagcatgcgaagtcgtgaccggcagtccacggggggactcccagtccagctggaaatccgtgggctctcaatgggcttcgcctgagaatccctgtctgatcaatgagtgcgtccgtgtaaaagaggaggtatttatccagcagagaaatgtaagttgcccacagctggaggtccctgtatgtccctccggtttccagttgagctgcaagacatctgcatgttgtccctcttgtagatgtgaacgcatggaagcatgcatgctcaacggtacagtgatcggaccaggcaagaccgtgatgatcgacgtatgtacgacgtgccgctgtatggtccaagtcggtgttatttcgggcttcaaactcgaatgcagaaaaactacttgcaacccctgcccacttgggtataaggaagagaataacacgggagaatgttgcgggcggtgtctgccgactgcttgcaccatacaactgaggggaggccagattatgaccttgaagagggatgaaacgctgcaagatgggtgcgatacccacttttgtaaggtcaacgagcgcggggaatatttttgggagaagcgggtgacaggatgtccacccttcgacgagcacaaatgcctggccgaaggcggcaagattatgaaaatacctgggacctgctgcgacacctgcgaggagccggaatgtaatgacataaccgcccggttgcagtacgtgaaagtcggctcttgtaagtctgaagttgaggtggacattcactattgtcaaggtaagtgcgcttctaaagctatgtattccatcgatatcaatgatgtacaggaccagtgctcctgttgttctccaactcggaccgaacccatgcaggtggccctgcattgcaccaatggatcagtggtctaccatgaggtccttaatgctatggaatgcaagtgctcacctaggaagtgcagtaag

SEQ ID NO: 21414 - DNA, 8439 bp, synthetic construct
  misc_feature 1..8439: note = source = /note="Description of Artificial Sequence: Synthetic coding sequence"
  source 1..8439: mol_type = other DNA
atgatacccgcacgtttcgcaggcgtcctcttggccctggcgctgatcctgcctgggaccctgtgcgcagaaggcacccgcggccgatctagcacggcccgatgcagcctgttcggttctgatttcgttaatacctttgacggcagcatgtacagctttgcggggtactgctcttatttgctggcgggcggctgccagaagaggtctttttccatcattggcgattttcaaaacggtaagcgcgtgtccctgagcgtgtatctcggtgagttttttgatattcacctgttcgtgaatggcacagtgacccagggcgaccagcgcgtgagcatgccgtatgcaagcaagggtctgtacctggaaacggaagcgggttattacaaactgagcggtgaggcttacggatttgtggcccgcattgacggtagcggcaatttccaggtactgctgagcgaccgctactttaataagacctgtgggctgtgcggcaacttcaatatctttgcagaagacgattttatgacccaggagggaacgcttaccagcgacccgtatgactttgccaacagctgggccttgagcagcggtgagcagtggtgcgagcgcgcgtctccgccatcaagctcttgtaacatttcctcaggagaaatgcagaagggtctttgggaacagtgccagctactaaaatccacgagcgttttcgcgcgctgccatccactggttgatccagagccattcgtggccctgtgtgaaaagactctgtgcgagtgcgcgggcggcctggaatgcgcctgccctgcgctgctggagtacgctagaacctgcgcgcaagagggcatggtcctgtatggctggaccgaccacagcgcgtgcagtccagtttgtccagcgggtatggaatatcgccagtgtgtctccccatgtgcgaggacctgccagagcctgcatattaacgagatgtgtcaggagcgctgcgtcgatggttgctcttgccctgagggtcagctgctggatgaaggcttgtgtgtagagtctaccgagtgcccatgtgtccacagcggtaagaggtatcccccggggacctcactgtcgcgcgattgtaacacgtgtatttgccgtaacagccagtggatctgcagcaatgaggaatgtcccggtgaatgcctggtgacgggtcagagccattttaaatcatttgataacagatattttacctttagcggtatttgccagtatctgttggctcgtgactgccaagatcactctttctccattgtcattgaaaccgtccagtgtgctgacgatcgcgatgctgtctgtacccggtctgtgacggttagactgcccggactgcacaattcgctggtgaagttgaaacacggcgcaggtgtggcgatggacggtcaggacgtacaactcccactgttaaagggggacttgcgcattcaacacactgtgaccgcatctgtgcgattgagctacggcgaggacctgcaaatggactgggatggtcgcggacgcctactggtgaaactttctccggtgtacgccggtaaaacgtgtgggctatgcgggaactacaacggtaaccagggggatgatttcctgacgccgagcggattggccgagccacgcgtggaagacttcggcaacgcttggaagctgcatggtgattgtcaagatctgcagaagcaacacagcgatccttgtgctctgaacccaagaatgacgcgtttttccgaggaagcctgtgcagtgctgacgtcaccaacgttcgaggcctgtcacagggctgtctctcctctgccatacctgaggaactgccgctatgatgtttgttcctgttctgacgggcgagaatgcctgtgcggtgcgcttgcgtcgtatgcggcagcgtgcgctggccgcggcgtccgcgtcgcatggcgcgaacctggtcgctgtgaactgaattgccctaaaggtcaggtttatctgcagtgtggtaccccgtgcaatcttacgtgtcgctccctgagctacccggatgaagaatgcaacgaggcatgcctggaaggctgtttttgtcctcctggcctgtacatggatgagcgcggagactgtgttccaaaagcacagtgcccttgctattatgatggcgagatcttccagcccgaggacatcttctctgatcaccacaccatgtgctattgcgaagacggttttatgcattgtacaatgagcggtgtgcctggaagcctgctgccagatgctgtgttgagcagcccgctgtcgcaccgcagtaagcgcagcctgagctgccgccctccgatggtgaaattggtgtgtcctgcggacaatctgcgtgctgagggcctcgagtgtacgaagacctgtcagaattatgatctggagtgtatgagcatgggatgcgtttctggttgtttgtgcccacctgggatggtcaggcatgagaatcgctgcgtcgcactggaacgttgtccgtgctttcatcagggcaaagagtatgcgcctggtgagactgtcaagataggttgcaacacgtgtgtgtgtcaggaccgcaagtggaattgtaccgaccacgtgtgtgacgcaacctgctccacgataggcatggctcactacctcaccttcgacggcctcaaatatctgtttcctggtgagtgtcagtatgtattggtccaggactattgcggaagcaacccgggaacttttcgcattctggtcggtaataaaggttgttcccacccgagcgtcaagtgtaagaagcgtgtaacaattctggttgagggtggtgaaatcgagctgtttgatggcgaagtaaacgtaaagaggccaatgaaggatgagacccattttgaagtggtggagagtggccgatacattattctactattaggtaaggcgctgtctgtggtctgggaccggcatctgagcatctccgtcgttctgaaacagacttatcaagaaaaggtgtgcggcctgtgcggcaactttgatggtatacaaaataatgacttgacctcttctaacctgcaagtagaggaagatccagtggatttcggaaattcctggaaagtttcctcccagtgtgccgacaccaggaaggtgccattggactcctcgccggcgacctgccataacaacattatgaagcagactatggtggatagctcctgtcgcattttgacgagcgatgttttccaggattgcaacaagctggtcgatccggaaccgtacctggacgtgtgtatctatgatacgtgtagctgcgagtctattggtgactgcgcgtgcttttgcgacacaatcgcggcgtacgcgcatgtttgcgctcagcacggtaaggtggtgacttggagaactgcgaccctgtgcccgcagtcatgtgaggagcggaacctgcgcgaaaatgggtatgagtgtgagtggcggtacaactcctgtgctccggcatgccaagttacgtgccagcacccggaaccgctggcgtgcccggtccaatgcgtggagggttgccatgcacactgcccgcccggtaaaatactggacgagctgctgcagacctgcgtggacccggaggactgcccggtctgcgaagttgctgggcgacggttcgccagcggtaagaaggttacgctgaacccgagcgatcccgagcactgccaaatatgtcactgcgacgttgtgaatctgacttgcgaggcctgccaggaaccgggaggtctggtcgtgcctccgactgatgcaccggttagcccaaccaccctctacgtggaggacatttccgagccgccattacatgatttctactgctcccgcctattggacctggttttcttgctcgatgggtcatcccgcctgtcggaagctgaattcgaggtcctgaaggcttttgttgtggatatgatggagcgcctgcgcatcagtcaaaaatgggtgagagttgcggtcgttgagtaccatgacggtagccatgcatacattggtctgaaggatcgcaagcgcccttcggagctccgccgcatcgcaagccaggtgaagtacgctggttcacaagtggcgagtaccagtgaagtgctcaagtatactctgtttcaaatattttctaagatcgaccgccctgaagcatctcgtattaccctgctgctgatggcgtcgcaagaaccgcagcgcatgagccgcaacttcgtccgttacgtccaggggctgaaaaagaaaaaggtgatcgtcattccagtgggtatcggtccccacgcaaacctcaaacagatccgtctgatcgaaaagcaggctccagagaataaagccttcgttctttcatcagtcgatgaactggaacagcaacgagatgaaattgtgagctacctgtgcgacttagctcccgaagcgccacccccgacgttgcctcctgacatggcgcaagtcaccgtgggccctggtctgctgggtgtgtccaccctgggtccaaagcgtaactctatggtgctggatgttgcttttgtgttggaaggtagcgataagattggtgaagcggatttcaaccggagcaaggaatttatggaggaagtgatacagcgaatggacgtcggtcaagatagcattcatgttactgtgctccagtatagctacatggtgaccgtggagtacccattcagcgaagcgcagagcaagggtgacatcttacaacgcgtccgcgaaattcgataccagggtggtaacagaactaacactggactggccctgcggtacctgtcagaccacagcttcttagtgagccagggtgatcgcgagcaggcgccaaatttggtgtatatggtcactggaaacccagccagcgatgagattaagcgcctgcctggtgacatacaggtcgttccgattggtgtgggtcctaatgctaatgtacaggagctggaacgcatcggttggcccaatgcacccattctgatccaggactttgaaaccctcccacgcgaagctcctgacctagttttgcagcggtgctgcagcggtgagggtctgcagattccaaccttgagcccagccccggactgcagccagccgctggacgtgatcctgctgctagacggctcctcctcctttccggcctcatatttcgacgagatgaaaagctttgcgaaggcgttcatctccaaagcaaacattggccctcgcttgacccaggtcagcgtgctgcagtacggctctatcaccactattgatgtcccgtggaacgtcgtgccggaaaaggcacatctgctttctttagtcgatgtgatgcagcgggaaggaggtccgtctcaaattggtgatgcgctgggcttcgccgtgcgctatcttaccagcgagatgcacggtgcacgtccgggcgccagcaaagcagtcgtgatcctggtcacggatgtttcagttgatagcgtggatgccgccgctgatgccgcccgtagcaatcgtgtgactgtcttcccaatcgggattggggataggtacgatgccgcacagctgcgcatcctggcaggtcctgccggcgatagcaatgttgtgaagctgcaacggatcgaggatctgccgaccatggttactttaggtaactcctttctgcacaaactgtgctctggttttgttcgcatttgcatggatgaagatggtaatgagaaacgcccaggcgatgtgtggactctaccggaccagtgtcataccgttacctgccaaccggacggacagacgttgctgaaaagccaccgtgtaaattgcgaccgcggactgcgccctagctgccctaattcccaaagcccggtgaaggttgaggaaacatgcggatgtcgctggacctgtccgtgtgtttgcactggcagctctacgagacacatcgttactttcgatggtcagaatttcaaactaactggcagttgttcctacgtcctgtttcaaaacaaggagcaggatctggaggtgatcttgcacaatggtgcctgtagcccaggcgcgcgccaaggctgcatgaaatcaatcgaggttaaacatagcgcgctgtctgtggagctccattcagacatggaggtcaccgtgaatggccgtctggtctccgttccttacgtgggtggcaatatggaggtcaatgtgtacggtgccattatgcacgaagttcggttcaaccatttgggccacattttcacatttacgcctcagaacaacgaatttcaactgcagctctctcctaaaactttcgcaagcaagacttacggattgtgcggtatctgtgatgaaaatggcgctaatgacttcatgctgagagatggcacggtgaccaccgactggaagacgctggtccaggaatggacggtgcaaagacctggtcagacctgccaacctatcctcgaagagcagtgcttggtgccagacagcagccattgccaggtcctgctgctacctctgtttgctgagtgtcataaggtgctggcgccggcaaccttctacgctatctgtcagcaggacagctgccaccaggaacaggtgtgcgaggtgattgcttcctacgcacacctgtgcaggactaatggtgtctgcgtggattggcggaccccggatttctgcgctatgtcttgtcctccttctctggtgtataaccactgtgagcacggctgtccccgtcactgcgacggaaatgtgtcttcgtgcggcgaccacccatctgagggttgcttttgtcctccagacaaagtcatgctggaagggagctgcgttccggaggaggcatgcacgcaatgcatcggggaagacggtgttcagcatcaatttctggaagcctgggtgccggatcaccaaccgtgtcagatttgcacgtgtctctcaggtcggaaggtgaattgcaccacacagccatgtccaaccgcgaaggccccaacgtgtggtctgtgtgaggttgctcgcttgcgccaaaatgcagatcagtgttgcccggagtatgagtgcgtctgcgacccggtgtcctgtgatctgccgcctgtgccacactgtgagaggggtctgcagcctaccctgactaacccaggggagtgcagaccaaattttacctgcgcatgccgcaaagaggagtgcaaacgcgttagcccaccttcttgccccccacatcgcttgcccacccttagaaagactcagtgttgtgacgaatatgagtgcgcctgcaattgcgtgaactctaccgttagctgtccgctggggtacttggcaagtacggccacgaacgattgtggttgtacgactacaacgtgcctgcctgataaagtgtgtgttcaccgctccaccatttaccctgtcggccagttttgggaagagggttgtgacgtatgcacctgtaccgacatggaagacgcagtgatgggtctgcgtgttgcacagtgctcccagaagccctgcgaggatagttgccggagtggattcacctacgtcctgcatgagggagagtgctgtggccgctgcctgccaagcgcgtgtgaagtcgtgaccggcagcccgcgcggtgacagccagagttcatggaaaagcgttggttctcagtgggcgtctccggagaacccttgtctgattaacgagtgcgtgcgcgtgaaagaggaagtattcatccagcagcggaacgtgtcttgcccccaactggaggtccctgtttgcccttccggcttccagctgagctgtaaaacgtcggcgtgctgtccgagctgccgctgtgagcgcatggaggcgtgcatgctcaatggcaccgtcatcggtcctggcaagacagtcatgattgatgtctgcacaacatgtagatgtatggtccaagtcggggttatcagcgggttcaaactggaatgtcggaagaccacctgcaacccgtgccctctgggctacaaggaggaaaataataccggtgagtgttgtggaagatgcctgcctacggcctgcaccattcagctgcgaggcggccagattatgacgttaaagcgcgacgaaactttgcaggacggctgcgacacccacttttgcaaagttaatgagcgaggtgagtatttttgggagaaacgcgtgaccggctgtccgccatttgacgagcataaatgtctcgctgagggcggcaagatcatgaagatcccaggcacctgttgcgacacctgtgaggaaccggaatgcaatgacatcacggctcgccttcaatatgtgaaggttggctcgtgtaaaagcgaggtggaagttgatatccactattgccaaggcaagtgcgcttccaaagctatgtattccatcgacattaatgatgttcaggatcagtgctcttgttgcagcccgacccgaactgagccaatgcaagttgcgctgcactgcaccaacggaagtgtggtttaccatgaggtgctgaatgccatggaatgtaaatgctcgccgcgcaaatgttcaaag

SEQ ID NO: 21415 - DNA, 8439 bp, synthetic construct
  misc_feature 1..8439: note = source = /note="Description of Artificial Sequence: Synthetic coding sequence"
  source 1..8439: mol_type = other DNA
atgatcccagctcgcttcgcaggtgtgctgctggctctcgcactgatcctcccgggcacattatgtgcagagggaacccggggaagaagtagcacagctaggtgtagcctgttcggttctgactttgttaatacgttcgatgggagcatgtactcgttcgctggttattgctcctacttgcttgcagggggttgccagaaaaggtctttctccatcattggtgatttccagaatggtaaaagagtgtcgctgtccgtgtatttgggcgagttttttgacattcacttgttcgttaacggcactgttacccaaggcgatcagcgcgtaagtatgccttacgctagcaaaggcttatatctggaaacagaggctgggtattataaactctctggagaagcctacggtttcgtggcccgtatcgacggatccggaaacttccaggtcctgctatcagaccggtacttcaacaagacctgtggtctttgtggaaacttcaacatcttcgcggaggatgacttcatgacgcaggaggggaccttgacctccgatccatacgattttgctaatagctgggcactctccagcggagaacagtggtgcgagcgcgcatctcctccctcttcgagctgtaacatctcctcgggggagatgcagaaaggtctgtgggaacagtgccagctcttgaaaagtaccagtgtttttgcccggtgccacccattggtggacccagagccgttcgtggccctttgcgagaagacgctgtgtgagtgcgccggcggcctggaatgtgcctgtcccgccttattggagtacgcccggacatgtgcacaggaaggcatggtgctttacggctggaccgatcactcagcatgttcacccgtgtgtcctgctggcatggagtacaggcaatgcgtcagcccctgtgcccggacttgtcagtccctccatatcaacgagatgtgccaggagaggtgtgttgatggttgcagctgtcctgaaggtcagctcctcgacgaggggttgtgtgtagaatctaccgagtgtccctgcgttcacagcggaaagcgctatccacctgggactagtctatcacgggattgcaatacatgcatatgccggaattcccagtggatttgttctaacgaggagtgccctggcgaatgtctcgtgaccggtcagagccacttcaaaagcttcgacaatcggtatttcacatttagcggtatctgtcaatatctgttggctagagactgtcaggaccactctttcagcatagtgattgagacagtgcagtgcgctgatgacagggacgcagtgtgtactagaagcgtgaccgtgcgtctccccggtctccacaacagtttggtgaagctgaaacatggagcaggggtcgcgatggatggccaggatgtgcaactgccgttgctcaagggagatctgcggattcagcacacagtcactgccagtgttcgactgagctacggagaggacttgcagatggactgggacggcagggggaggttgttagtcaaactaagcccagtgtatgcgggaaaaacttgtggcctctgtggaaattataatggcaaccagggagatgactttctcacaccctcagggctggctgaacctagggttgaggattttgggaatgcttggaaactgcacggagattgtcaagatttacagaagcaacactcagatccttgcgctctgaacccccgcatgaccagattcagcgaagaggcatgcgccgtccttacatctcccacgttcgaagcctgccacagggcagtcagcccgttgccttatctgagaaattgccgttatgatgtctgcagttgtagtgacggccgagagtgcctgtgcggtgccctagcctcctacgcagccgcttgtgccggaagaggggtccgtgttgcatggcgcgagcccggccggtgtgagctaaattgccccaaaggacaagtctaccttcagtgtggcaccccctgcaatcttacctgccgtagcttatcctatccagacgaggaatgcaacgaggcttgcctagaggggtgtttctgtcctccgggtctttacatggacgagagaggggattgtgtcccaaaagcccagtgtccctgttactacgatggcgagatctttcagcccgaggatattttctccgaccaccatacaatgtgctattgtgaagatgggttcatgcactgtacgatgagtggtgttcccggttccctgctacccgatgcagtattgagcagccccctgagccaccggtctaaacggagtctctcatgccggccgccaatggttaagttagtgtgccccgccgataacttgagagccgaaggactggaatgcaccaaaacgtgtcagaactacgatctggagtgcatgtctatggggtgcgtgagtgggtgtttgtgtcctcctggaatggtcagacacgagaaccggtgcgtcgcactggaacgctgcccgtgctttcaccaaggaaaggagtatgcgcctggcgaaactgtgaaaatcgggtgtaatacctgcgtgtgccaggataggaaatggaattgcaccgaccatgtttgtgatgcaacctgctccacgattggtatggcccattacctgacctttgacggcttgaagtacttgtttcccggggagtgtcaatatgtcctcgtccaggactactgtggatctaaccccggaacatttcgcatcctggtggggaataaaggctgttcgcatccctctgttaagtgcaagaagcgcgttactattctggtggagggtggagaaattgagcttttcgacggtgaggtgaacgttaagagaccaatgaaggacgaaactcactttgaagtcgtagagtctggccgttatataatcctcctgttaggcaaagctctatctgtggtgtgggatcgacatctgagcatctccgttgtactcaagcaaacttatcaggaaaaggtctgcgggctatgcggcaattttgatgggatccagaacaatgacttgacttcctctaacctgcaggtcgaagaagacccggtggactttggtaattcttggaaggtgagttcccaatgcgcagataccagaaaagtgccactcgattcatctcccgccacgtgccataataacattatgaagcagaccatggtagactcttcctgccggatccttacatcagatgtgttccaggattgcaacaagctcgtagatccagagccctaccttgacgtgtgcatctacgatacttgtagctgcgagtcaattggggactgtgcatgtttttgtgatactatagcggcttacgcacatgtgtgcgctcagcatggaaaagtggtcacctggagaacagccaccctatgtccgcagtcctgcgaagagcgcaacctgagagagaatggctatgagtgcgagtggaggtacaactcttgtgcacctgcatgccaagtgacttgccagcatccagagccactcgcatgtccagtacagtgcgtggagggttgtcacgcccactgccctcctggtaagattctagacgagctcttacagacgtgtgtggaccctgaagattgcccggtgtgtgaagtagcaggacggcgattcgcttctggaaaaaaggttaccctgaaccccagtgatcccgagcattgccagatctgccactgtgatgttgtgaacctgacatgcgaggcctgccaggagcctggcggcctggtagtgccccctacggacgccccggtgtcacccaccacactgtacgtcgaggacatctccgagcctcctctgcacgacttctactgttcacgtctgctggatctggtgtttctgctcgacggctcgtcgcgcctgtccgaggctgaatttgaggtgctgaaagcatttgtagtcgacatgatggagcggctccgtatatcacagaaatgggtgcgcgtggccgtggttgagtaccacgacgggagccacgcatacatcggactgaaggatcgaaagaggccaagcgagcttcggcgcatagcttcacaggtaaaatacgcaggaagtcaagtggcgtcaacaagcgaagtgcttaaatacacactgtttcaaattttttccaagatcgaccggcccgaggcctcccgcataaccctgttgctcatggcttctcaggaacctcagcgcatgagccgaaacttcgtcaggtacgttcagggtctcaagaagaagaaggtcattgtcatacccgtcggaatagggccgcatgcgaatctgaagcaaatccggctgatagagaaacaggccccagagaacaaagcctttgttctctcctcagtagacgagctggagcagcagcgcgatgaaattgtaagttatctctgtgatcttgctcccgaagcaccaccccctaccctacctccggatatggcccaggttactgtagggcccggattgctgggcgttagcaccctgggccctaaacgtaattctatggtattggacgtggcctttgtcctggagggatctgataagattggggaggccgattttaaccgcagcaaggagttcatggaggaggtgatccagagaatggacgtgggacaagatagtatccatgtcaccgttcttcagtattcttatatggtaaccgtggaatatccattttcagaagcccaaagtaagggggacatcttacagagggtgcgggaaataaggtatcaaggggggaatcgaactaacaccgggcttgcattgaggtatctatccgatcactccttcctggtcagccaaggggatagggagcaggcacccaatctcgtttatatggtaacgggtaatcctgcatcagacgagatcaagagattgccgggcgatattcaagtggtgcccattggcgtcgggccaaacgcgaatgtgcaggagctggaaaggatcggctggcctaacgcaccaattctgattcaggatttcgagaccttgcctcgggaagctcccgacttagtcctgcaacgatgttgttccggggagggcctgcaaatccctacacttagtcctgccccagattgctcacaacccctagacgtgatcctgttgcttgatggcagtagcagctttccagccagctatttcgacgaaatgaagtcattcgctaaggccttcatttcaaaagccaacattggacccagactaacacaggtgagtgtcctccagtacggttctataaccacgatcgacgtgccctggaacgtggtccctgaaaaagcgcatcttcttagcctggttgatgttatgcaaagagaaggggggccatcacaaataggcgacgcactaggatttgctgtgaggtatctgacatccgagatgcacggagccagaccgggagccagcaaagcagtggtaattctggtgaccgacgtgtctgtcgattcagtggacgccgcggccgacgccgcacgatcgaatagagtgaccgtgtttcccattgggattggggatcggtacgacgccgcccagctgcgcatcctcgctggccctgccggcgactccaatgttgtcaaactgcagaggatcgaggacctcccgactatggtgactctgggcaacagcttcctacacaagctgtgttctggtttcgtccgtatctgcatggatgaggatggtaacgaaaaacggccgggggacgtgtggaccctacccgatcagtgtcataccgtgacctgccaacctgacgggcagacccttttaaagtcacaccgagtaaactgcgatcggggtttacgcccatcttgccctaatagtcagagcccagtaaaggtggaggagacctgtggctgcagatggacctgtccctgtgtttgtaccggatcttcaactagacacatcgtcactttcgatgggcagaacttcaaactaaccgggagttgtagttatgtgctgttccagaataaggagcaggacttggaagtgatcctccataacggagcctgtagtcctggagcgcgccaaggctgcatgaaatccattgaggtgaagcacagtgcgctaagcgttgagttacatagtgacatggaggtgactgttaacgggcgtttagtatcggtgccatacgtgggaggtaatatggaggtcaatgtgtatggcgccataatgcacgaggtgagatttaatcatctggggcatatcttcaccttcacacctcagaataacgagttccagctgcaactaagccccaaaacgtttgcctccaagacttatggtctatgcggtatatgtgacgagaacggcgccaatgactttatgctgcgcgatgggactgtgacaacagattggaaaactctcgtccaggagtggaccgtgcagcggccaggacagacttgccagccaatactagaggaacagtgtcttgtccccgactcttctcactgccaggtgctcctgctgccactgtttgccgagtgtcacaaggtgttagctcctgctacattctatgcaatttgccagcaggactcctgccaccaggaacaggtgtgtgaggttatcgctagttacgcacatctctgtaggacaaacggggtttgcgtggactggaggacacccgacttctgtgctatgtcatgccccccttctctggtgtataaccactgcgaacacggttgccctcggcactgcgatgggaatgtgtcatcttgcggagatcacccaagcgagggctgtttctgcccacctgacaaggtgatgttggaaggctcatgcgtaccagaagaagcatgtactcagtgcattggagaggacggtgtgcagcatcagtttctggaggcttgggtccccgaccaccagccatgccagatctgcacctgcctgtctggaaggaaggtgaactgcaccactcagccctgtccgacagctaaggcccctacctgtggcctttgcgaagtggctaggctcagacagaacgccgaccagtgctgtccagagtatgaatgcgtgtgtgatccagtgtcctgtgacttgcctccagtccctcactgcgaacggggtctccagcctactcttacgaaccccggcgagtgcagacccaacttcacgtgcgcttgtcgcaaagaggagtgcaagcgagtgagcccgccctcttgccctccgcatcgacttccaactttgaggaagacacagtgctgcgacgaatatgagtgcgcctgtaattgtgtaaacagtacagtgagttgcccgcttggttatcttgcttcaacagccaccaacgattgcgggtgtacgacgactacctgtctccctgacaaggtatgtgttcatcgctccactatttacccagtgggacagttttgggaggaaggatgtgacgtctgcacctgcaccgatatggaggacgctgtcatgggacttagagtggcccagtgttctcagaaaccttgtgaggattcttgccggtcggggttcacttatgtgctgcacgagggcgaatgttgtgggcgctgtctacccagcgcatgcgaggttgtgactggtagtcctcggggggattcacagagttcctggaaatccgtgggctcccagtgggcgtcgcccgagaacccatgtttgatcaacgaatgtgttcgcgtcaaagaggaagtgttcattcaacaaagaaatgtaagctgtccccaactggaagtgcctgtgtgcccctccgggtttcagttgtcctgtaaaaccagcgcttgctgtccatcgtgcaggtgtgaacggatggaagcatgtatgcttaatggtacagtgatcggtcccggcaaaacggtgatgatcgacgtctgtacaacctgtcggtgcatggtgcaggtcggcgtcatctcaggatttaagcttgagtgtcgcaaaacgacatgtaacccttgccctctgggttataaggaggagaacaatactggagagtgctgtggacgatgtttgcctaccgcttgtaccatccagctccgaggcggacagatcatgacactaaagcgggatgaaaccctccaggatggttgcgacacacacttttgtaaagtgaatgagcgcggcgagtatttctgggagaagcgcgtgaccgggtgcccaccattcgacgagcataagtgccttgccgaaggagggaagataatgaagatacctggcacctgttgcgatacgtgcgaggaacccgaatgcaacgacataacagctcgtctccagtacgtgaaagtgggcagctgcaaaagcgaggttgaagtagacatacactactgtcagggaaagtgcgccagtaaagcaatgtattccatcgatataaatgacgtgcaggatcagtgttcatgctgctcccccacccggaccgaacctatgcaggttgctcttcattgcaccaacggatctgtggtgtatcacgaagtgctgaacgctatggagtgtaagtgttcgccgcgcaagtgctccaag

SEQ ID NO: 21416 - DNA, 8439 bp, synthetic construct
  misc_feature 1..8439: note = source = /note="Description of Artificial Sequence: Synthetic coding sequence"
  source 1..8439: mol_type = other DNA
atgatccccgcgaggtttgccggcgtgctcttggcgctcgccctgatcctgcccggcaccctctgcgccgagggcacacgcggccgctcaagcacagctcggtgctccttgtttgggagcgacttcgtgaacactttcgatggctccatgtactcttttgccggatactgcagctacctgctggccggagggtgccagaaaagatctttttcaatcatcggggatttccagaacggtaaacgggtaagcctgtccgtgtacctgggagagtttttcgacatccacttgtttgttaatggaaccgtgactcaaggagaccaaagggtgtctatgccatatgctagtaaaggcctgtacctggagactgaagcgggttactataaactgtctggcgaagcctacggattcgtggctcggatcgacggatcaggcaatttccaggtgctcctttctgacagatatttcaacaaaacctgcgggctgtgcggtaacttcaacatctttgctgaggacgattttatgacacaggagggcactctgacttccgacccttatgattttgccaacagctgggccctgagctctggtgagcagtggtgcgagagagctagcccccctagttcctcttgcaatatatcttcaggtgagatgcagaagggtctgtgggaacaatgtcagttgttgaaaagcacaagcgtgtttgcaagatgtcaccccctggtcgacccagaacccttcgtggcactttgtgagaagaccctgtgtgagtgcgctgggggccttgaatgtgcctgtcccgcattgttggagtacgcaaggacttgtgcccaggaggggatggtcctgtacggctggaccgatcattctgcttgttcaccggtctgtcctgcggggatggagtatagacagtgcgtttcaccgtgtgcccgaacttgtcaaagtctccacattaatgaaatgtgtcaagaacgatgtgtggacgggtgctcttgccctgaggggcagcttcttgatgaaggcctgtgcgtcgagtctacagaatgcccgtgtgttcattctggcaaacgatatcctcctggcacttctttgtctagagattgcaacacctgcatatgtaggaactcccagtggatttgttccaacgaggagtgccccggagaatgtctggtgactgggcagtctcatttcaagtcatttgacaaccggtacttcacattttctggtatctgtcaatacctgttggctcgagactgtcaagatcatagtttcagcattgtcattgaaactgtgcaatgcgcggacgatagagacgccgtgtgtacacggagtgtcactgttagattgccaggcctgcataacagtttggtcaaactcaagcacggcgccggagtggccatggatgggcaggacgtgcagctgccgcttctcaaaggagacctgcgaattcaacacacagtcacagcatcagtccggctgtcctacggcgaagatctccaaatggactgggacggacggggccggctcctggtcaagctcagccctgtgtacgccggtaaaacgtgcggcctgtgcggcaactataatggaaaccaaggcgatgattttctgaccccatcagggcttgctgagccccgggtggaggacttcggcaatgcatggaaactgcatggtgactgtcaggacctgcaaaagcagcacagcgacccttgtgctctgaaccctaggatgacaagattctcagaggaagcttgcgcagtactgacttccccaacatttgaggcctgccatagggccgtgagccccctgccttacctgcggaattgtcgatatgatgtatgcagttgttccgacggcagagagtgcttgtgcggagctctggcctcctacgccgcagcgtgcgccggtaggggcgtaagggtcgcatggcgcgaaccaggccgctgcgagcttaactgcccaaagggtcaggtgtatttgcaatgtggtacgccatgtaacctgacatgtaggagcctgtcttaccctgacgaggagtgcaacgaagcctgtctggaagggtgtttttgccctccgggactgtatatggacgaaaggggagattgtgtgcccaaagcccagtgtccgtgctactatgacggagaaatctttcagccagaagatattttcagcgatcaccacactatgtgttactgtgaggacgggttcatgcactgtacaatgtctggagttcctggaagcctgctgcctgacgctgtgctgagcagtcccctgagtcaccgctccaagagaagtctgagctgcaggcctcccatggtaaaactggtgtgcccagctgataacctccgagccgagggactggagtgtacaaagacttgccagaactatgatctcgagtgtatgtcaatgggatgtgtgagcgggtgtctgtgccctcctggcatggtcaggcatgaaaatcgctgtgtcgcgctcgaacgatgtccctgcttccaccaaggcaaggagtatgctccgggagagaccgttaagataggatgtaacacgtgtgtttgccaggacaggaagtggaactgcactgatcacgtctgtgatgctacctgttcaacaatcgggatggctcactatctcacattcgatgggcttaagtacctgttcccaggggaatgccagtatgttctggtacaggactactgcggcagcaacccaggcacattcagaattctggttggaaacaagggttgctctcatccttctgtgaaatgtaagaagcgagtcaccatcctggtggagggcggagagatcgagctgttcgacggcgaggtaaatgtgaaaaggcctatgaaagatgaaacacactttgaggttgttgaaagtggcaggtatattatccttctgctcgggaaggccctgtctgtagtctgggatcgacatctgtccatcagcgtggttctgaaacaaacataccaggaaaaggtgtgcggtctttgtggaaattttgacggaatccaaaacaacgatttgacaagcagtaacttgcaggttgaagaggacccggtggactttggcaactcttggaaggtatcaagccagtgcgccgacacacgcaaagtcccacttgactcttcccctgctacctgccacaacaatatcatgaaacagacgatggttgactcatcctgcaggattctgacttcagacgtcttccaggactgtaataagcttgtagatccagagccgtacctcgacgtatgtatttacgacacatgtagctgcgagagcattggggattgcgcctgcttctgtgataccattgccgcttatgcgcatgtttgtgcgcaacacgggaaggtggtgacgtggaggaccgccacgctgtgtcctcagtcctgtgaagagcgcaacctgagagagaatggatatgagtgtgaatggcggtacaactcttgcgcccccgcctgccaggttacatgtcagcatcccgagccactggcctgtcccgtgcagtgcgtggagggctgccatgcccattgcccaccaggcaaaatcttggatgaacttcttcaaacatgcgtggatccagaggattgtccagtatgcgaagttgccggaagaagattcgctagtggaaagaaggtgacccttaatccgagtgaccccgaacattgtcagatatgtcactgcgatgtagtaaacctgacttgtgaggcgtgccaggaaccggggggtctggtagtgccacccactgacgccccagtgagcccgaccactctctacgtggaggacattagcgagccaccactccatgatttctactgttcacgcctcctcgatctcgtgttcttgctcgacggctcttccagactgtctgaggctgagttcgaagtgcttaaggcctttgtggtggacatgatggagaggctcaggatcagtcagaagtgggtgagagtagctgtcgtggaataccatgatggctcccacgcttatattggcctcaaagaccggaagcggccgtctgagctgcggagaattgcgtctcaagtcaagtacgcgggctcccaggtcgccagcaccagtgaggtgctcaaatacacactctttcagatcttctccaagatagaccggccagaggcaagcagaatcacattgctgctgatggctagccaggaacctcagaggatgagcaggaattttgtgcgctacgtccagggcctgaagaagaagaaagtgatcgtgatccccgtgggaatcgggccacacgcaaacctcaaacagatccgattgatcgagaagcaggcccccgagaacaaggcctttgtgctgagcagcgtggatgagctggaacagcagagggatgagatcgtgtcctatctctgtgacctggcacctgaggcccctccgcccactttgcccccagacatggcccaggtgacagtgggccctggcctcctgggagtgagtacccttggacccaagcggaactctatggtactggatgttgctttcgtgctggaaggctcagataaaattggagaggcagatttcaatcggtcaaaggagtttatggaagaggtaatccagcggatggacgtcggacaggactccattcatgtgacagtcctccagtactcttacatggtgaccgttgagtacccattttccgaagcccagagcaaaggcgacattcttcagcgggtaagggaaattagatatcagggcggcaacaggaccaacacaggcctggccctgaggtacctgtccgaccactcattcctggtgtctcaaggcgatcgcgaacaagcccccaacctcgtgtatatggtgacaggtaacccggcctcagacgagatcaaacgattgcctggtgatattcaggtcgttcctattggtgtgggaccgaacgccaacgtgcaggagttggagcggatcgggtggcccaatgccccaatcctcattcaggacttcgaaacattgccgagagaagcacctgatctggtgttgcagcgctgctgttctggtgagggtctgcaaatccctactctgagtcccgcacctgactgctctcagccgctcgacgttattttgctgctggatgggtctagcagctttcctgcatcctattttgatgaaatgaagtctttcgcaaaagcctttatcagcaaggccaatataggacccagactcactcaggtcagcgtgctgcagtacggaagcatcaccacaatagatgtgccctggaacgtggtgccagaaaaagcccacctcttgtcccttgtggacgtgatgcagcgggagggcggaccaagtcagataggtgatgccctcggcttcgcagtccggtatttgactagtgagatgcacggcgcacgccccggcgccagcaaggccgtggtaatcctggtcaccgacgtttccgtcgactccgtcgacgccgccgccgacgccgccagatccaacagggtcacagtcttcccaatcggtatcggcgatcgctacgatgctgcacaattgagaatcctcgccggacccgctggtgacagcaacgttgtcaaactccagaggattgaggatttgcctaccatggtgactctcggcaacagtttcctgcataagctttgctctggctttgttcggatctgcatggacgaggacggtaatgaaaagagacctggcgatgtgtggacccttcccgatcagtgtcatactgtaacttgccagcccgacgggcagacactgcttaagagtcatcgggtgaattgtgatcgagggctgcggccgagctgcccaaactcacaatcaccagttaaggttgaggaaacatgcggatgtaggtggacatgcccctgcgtgtgcacaggtagctccactcgccacattgtgacttttgatggtcaaaattttaagttgaccgggagttgctcctatgtcctgttccaaaacaaagagcaggatcttgaagttattctgcataacggagcatgctcccctggcgcccgccaggggtgcatgaaaagcattgaggtgaagcattccgcccttagcgtggaactccattctgacatggaggtgaccgtcaacggcaggctggttagtgtcccttacgtcggagggaatatggaagtcaacgtgtatggcgccatcatgcatgaagtgaggtttaatcaccttggccatatcttcacctttaccccccagaacaacgaattccagttgcaactctcccccaaaactttcgcatcaaaaacctacggcttgtgcggcatatgcgatgaaaatggagctaatgactttatgctcagggatggcaccgttacaactgattggaaaacgctggtgcaggagtggaccgttcagagaccgggtcagacctgccagccaattttggaagagcaatgcctggtgcccgacagtagccactgtcaagttctcctgcttccgctgtttgcagaatgccataaggtattggcacccgccaccttttatgctatctgccagcaggacagctgtcaccaggaacaggtctgcgaggtgattgccagctatgcccatctgtgtcggacgaatggcgtttgcgtggactggaggaccccggatttctgcgcaatgtcctgcccaccgtctttggtgtataaccactgtgaacatggttgtcctcgccactgcgatggtaacgtctccagctgcggagatcatcctagcgaaggctgtttctgcccccccgataaggtgatgctggaaggatcttgtgttcctgaggaagcttgtacacagtgtatcggcgaggatggggtgcagcatcagttcctcgaggcctgggttccagaccatcaaccttgccagatctgcacttgcctttctggtagaaaggtcaattgtaccacacagccttgtcctacagcgaaagcgccgacctgtggcctctgtgaagtggcaaggctgcgccaaaacgccgaccagtgctgccccgaatatgaatgtgtgtgcgaccctgtctcttgtgacctccctcccgtgccccactgcgagagaggtctgcaacccacgttgacgaacccaggcgagtgccggccaaattttacttgcgcgtgtaggaaggaggagtgcaaacgggtgtcacctccatcatgtcctcctcacagactcccaacactgagaaaaacccaatgctgcgatgagtatgagtgtgcgtgtaactgtgtgaactccaccgttagctgtccccttggctatcttgcatcaacagccactaatgactgcgggtgtaccaccaccacctgcctgcctgacaaggtttgcgtgcataggagtacgatctacccagtggggcagttctgggaagaaggctgtgacgtatgcacatgcaccgacatggaagatgcagtaatggggcttcgcgtggcccagtgttcccagaaaccgtgtgaagacagttgccggtctggcttcacttacgtcctgcacgaaggtgaatgctgtgggcgatgcttgcctagcgcgtgcgaggtggttactgggagcccgcggggcgactcccagagctcttggaagtctgtgggatctcagtgggcaagtcccgagaacccttgtctgatcaatgaatgtgtgcgagtgaaggaggaggtcttcatacagcagcgaaacgtgtcttgcccacagctggaggtcccagtgtgcccatccggattccaactgtcttgcaaaaccagtgcatgctgcccatcatgtcgatgtgagagaatggaggcctgtatgctgaatggtacagtgatcggcccaggtaagaccgtgatgatcgatgtatgcacaacctgccggtgcatggtgcaggtaggcgttattagcggctttaaattggagtgtcgaaagactacatgcaacccttgcccccttgggtataaggaggagaacaataccggggagtgttgcggaagatgtctccctaccgcctgtacgattcaactccgaggaggccagatcatgacccttaaacgggatgagaccctgcaagacggttgtgatactcatttttgcaaagttaacgagagaggcgaatacttctgggaaaagagagttacgggttgcccaccgtttgacgagcataagtgtctcgcagagggtggaaaaattatgaaaatccccggaacctgttgcgatacatgcgaggagccggagtgcaacgacattactgccagactgcagtacgtgaaggtaggatcatgtaaatcagaagtggaggtggacatacactattgtcaagggaagtgtgccagtaaagcaatgtatagtattgatattaatgacgtccaggatcagtgttcatgttgtagcccgacccggactgagcctatgcaggtggctttgcactgcactaacggctcagtggtctatcacgaggttctgaacgcaatggaatgtaaatgctctccgaggaagtgctccaag

SEQ ID NO: 21417 - DNA, 8439 bp, synthetic construct
  misc_feature 1..8439: note = source = /note="Description of Artificial Sequence: Synthetic coding sequence"
  source 1..8439: mol_type = other DNA
atgattcccgcacgtttcgcaggggttctattggcccttgccttgatcttgcccggtacgctgtgcgcagagggcacaagggggcgatctagcactgccaggtgctccctgtttggatcggattttgttaacacgtttgacggatcaatgtacagctttgccggctactgcagctacctattagccggaggctgccagaaacgctccttttcgatcattggtgattttcagaatggcaagcgggtttccctaagcgtctacctgggcgagttctttgacatccatctcttcgtaaacggcaccgttacacaaggcgaccaacgcgtgtctatgccctacgcatctaaaggcctctatcttgagaccgaggccggttactacaagctgtccggtgaggcctatggtttcgtcgctcgtatagatggctccggcaacttccaggtgctactgtcagatcgctattttaacaaaacctgcggtctttgcggcaatttcaacatttttgcagaagatgactttatgacccaggagggaaccttaaccagcgatccctacgactttgcgaattcctgggcgcttagttcgggagaacagtggtgcgagcgggcctctccaccgtccagcagttgtaacatctcctcgggcgaaatgcagaagggcctgtgggagcagtgtcaactcctgaagagcacctcagtgttcgcacgctgccatcccttggtagacccggagccttttgtggcgctgtgtgagaagaccttgtgcgagtgcgctggagggcttgaatgtgcttgccccgccctcttggaatatgccaggacctgcgcgcaagagggcatggtcctctatggctggacagatcactcggcttgctcgccggtctgcccagccggaatggagtatagacagtgtgtcagtccctgtgcgcgcacgtgccagtccctgcacatcaatgagatgtgccaggagcgttgcgtggacggatgttcgtgcccggagggccagctgttggacgagggcctgtgtgtggagtccacggagtgcccctgcgtccactccggtaagcggtatccgcccgggacatcacttagtcgggattgtaatacgtgtatttgccgtaacagtcagtggatatgctcgaatgaggaatgtcccggcgagtgcctggtgaccggacaatcccattttaagagcttcgataaccgctatttcacgttctcgggaatctgccaatatctgctggctcgagactgtcaggatcacagtttctcgattgttatcgaaaccgtccagtgcgccgacgaccgcgatgcggtgtgcacccgcagcgtgaccgtccgcctgccgggtctacacaacagcttagtcaagttgaagcatggtgccggcgtcgccatggatggccaggatgttcaactgccgctgttgaaaggcgacttgcggatccagcacacggtgacagcttcggtcaggctgtcctacggagaggacttgcagatggattgggacggtcgtggccgtctcctcgtcaagctgtcaccggtatacgccggcaagacatgtggtttgtgcggaaattacaacggcaatcagggcgacgactttctcacgccatcgggcctggccgaacccagagtggaggattttggaaacgcatggaagcttcacggagattgccaggatttgcagaagcagcattccgacccttgtgctttgaaccctcggatgactcgcttctccgaggaggcgtgtgccgtgctgacgtctccaaccttcgaagcgtgccatcgcgccgtcagccctctgccgtacttgcgtaactgtaggtacgatgtgtgttcttgcagcgatggccgcgaatgcctctgtggtgctctggcctcgtacgcggctgcctgcgccggtcgcggggttcgcgtggcctggcgagaaccaggaaggtgtgaactgaactgccccaagggtcaggtctacctgcagtgcggcaccccgtgcaaccttacatgccgatctttgtcgtatccagacgaggagtgcaacgaggcctgcctggagggttgcttctgcccgccgggattgtacatggacgagcgcggtgattgcgtcccaaaggcccaatgtccgtgctactatgacggtgagattttccagccagaggatattttctcagatcaccatacaatgtgctactgcgaagatggttttatgcattgcaccatgagcggggttccaggctctctgttgccagacgccgtcctgagcagcccgttgtcccaccgctcgaagcggtctctgagctgcaggccgccgatggtcaagctcgtctgccccgccgataaccttcgcgccgaaggcttagagtgtacgaaaacctgccagaattatgatctggagtgcatgtcgatgggttgtgtatcgggatgtctgtgtccgcctggtatggtgcgtcatgagaatcggtgcgtggccctcgagaggtgcccttgcttccaccaaggtaaggaatacgcccccggagaaactgtcaagataggctgcaacacctgcgtgtgccaggatcgcaaatggaactgcacagaccatgtctgcgatgctacatgctccacgattggcatggcacattacctaacattcgatgggctgaagtacctattccctggcgaatgccagtacgtgctggtacaggattattgcggcagtaaccctggtacgttccgcatcctggtgggcaataagggctgctcccatccgtctgtcaagtgcaaaaaaagagttaccatcctggttgaaggtggcgaaattgagctcttcgatggcgaggtgaatgtgaaacgcccgatgaaggacgagacccacttcgaggtagttgagagcggcagatatatcattttgctgctggggaaggcactgagcgttgtatgggaccgtcatctgtcaatttctgtcgtgctgaagcagacgtaccaagagaaggtgtgtggcctttgtggcaattttgacggaatacagaataacgatctgaccagctccaatttacaggtggaagaggatcctgtagacttcggaaacagttggaaggtgtcatcccaatgcgcagatacgcgaaaagtacccctggatagctcacccgcgacgtgccataataacataatgaagcagacgatggtggattcctcgtgcagaatccttacgtcggacgttttccaggactgcaacaagttagtcgaccccgagccatacctggatgtgtgcatttacgatacctgcagttgtgagtcaataggtgattgcgcgtgcttctgcgacaccatagcagcatatgctcacgtgtgcgcccaacatggtaaggttgtcacgtggcgcactgcgaccctgtgcccacagtcctgcgaagagcgcaatctgcgcgagaatgggtacgagtgcgagtggcgctataacagctgcgccccggcatgccaggtcacctgccagcacccggagccattagcatgcccggtgcagtgcgtggaaggatgccatgcgcactgcccacccgggaaaatcctggatgaactgctgcagacgtgtgtcgatcccgaggattgccccgtttgtgaggtggccggccgccggttcgcttccgggaagaaggtgactttgaaccccagcgaccccgaacactgccaaatttgtcattgcgatgtcgttaacttgacgtgtgaggcatgtcaggaaccaggcggactggtcgttcccccaacagacgcaccagtgagcccgacaaccttgtatgtggaagatatttccgagccgcccctgcatgacttctactgttcgcggctattggacttggtctttctgctggacggaagctcgcgactgtcggaggctgaattcgaggttcttaaggccttcgtggttgatatgatggagaggttgcgcattagccagaaatgggttcgcgtagcagttgtcgagtaccatgatggaagtcacgcctatataggactgaaggatagaaagcgccccagtgagctgcgccggatagcctcgcaagttaagtatgcagggagtcaagtcgcatctacaagtgaggtgctgaagtatacactgttccagattttttctaaaatcgaccgccctgaggcttcccgtattactttgctgcttatggcctcacaagagccgcaacgaatgagccggaacttcgtgcgttatgtgcagggcctgaagaaaaagaaagtgattgttattcccgtgggaattgggccccacgccaacctgaaacagatccgattgatagagaagcaggcacccgaaaataaggcatttgtcctgtcatcagtggatgagttggagcagcaacgtgatgagatcgtatcctacttatgcgatctggccccggaggcacccccccccaccctccccccggatatggcccaggtcacagtcggtccgggattgctgggtgtcagcaccttgggccccaagaggaattccatggtgctggatgtggctttcgtgctggagggctcagataaaatcggcgaagccgattttaaccgtagtaaggagttcatggaagaagtaatccagcgcatggatgtcggccaagactccatccacgtgacggtgctgcagtattcctacatggtaaccgtcgagtaccccttttcagaggcgcaatcgaagggggacattctacaacgcgttcgcgagattcgataccaggggggcaacaggacgaacaccggattagctctgcgctacctgagcgatcactcgtttctggtgtcacagggggatagggagcaggcccccaatctggtgtacatggtaaccggcaaccccgcttcagatgagatcaagcgcctccccggcgacattcaagtcgtcccgattggtgtgggaccgaatgccaacgtgcaggagctggaacgcataggctggccgaacgcgccgatcttgatacaggatttcgagaccctgccgcgcgaagctcccgacctggtcctgcaaaggtgctgctcgggcgaggggcttcagatcccgaccctgagtcccgcgcctgattgctcccagccattggacgtaattctcttgttggatggcagctcgagcttcccagcctcgtacttcgatgagatgaagagttttgcgaaggcctttataagtaaggcaaatataggcccccgactaacccaggtttcagtattgcagtatggctctataacgactattgatgtcccctggaacgtcgtgccagaaaaagcccacctgctatcgctggtagatgtgatgcagcgagagggaggaccctctcaaatcggcgacgccctgggattcgccgttcgatatctcacctcggaaatgcacggagcccgtccgggagcttccaaggctgttgtcattctagtgactgacgtgtccgtggactcagtagatgccgcggcggatgctgcgcgctccaaccgtgtgacggtgtttcccattgggataggcgatcgctacgatgccgcccagcttaggatcctggccggaccggccggtgacagcaacgtcgtcaagctgcaacgtatcgaggatctgcccactatggtgaccctgggaaattcgttcctccataagctttgctcgggattcgtacgaatatgtatggatgaagatggtaatgagaagcgtcccggcgatgtatggacgctgccagatcagtgccacaccgtgacatgccagccggacggtcaaaccctactcaagagtcatcgcgtgaactgcgaccgcggccttcggccgagctgccctaattcgcagtccccagtcaaggtggaggagacctgcggctgcaggtggacgtgtccctgcgtgtgcacgggaagtagtacgcggcatattgttacgtttgatgggcagaacttcaagcttacagggtcgtgctcatacgtccttttccaaaacaaggagcaggatctagaggtcatcttgcataacggcgcttgttcacccggagccaggcagggctgcatgaaatcgatcgaagtgaagcattccgccttgtcggtcgaacttcattctgacatggaagtgactgtgaacggccgcctcgtgagcgttccctatgttggtggtaatatggaggtgaacgtctacggagctataatgcacgaagtccgctttaatcacctaggccatatcttcacattcacaccccagaataatgagtttcaactgcagctctccccgaagacatttgccagtaagacttacggtctgtgcggaatctgcgacgagaatggtgcaaacgactttatgttacgtgacggaaccgtgacaaccgattggaaaaccctggtgcaagaatggacagtgcagagaccgggtcagacctgccagcccatactggaagaacaatgcctggttcccgacagcagtcactgtcaggtgctgcttctgccgctgttcgcggagtgccacaaagtgttggccccggccacattttacgcaatatgccaacaggacagttgccatcaagagcaggtctgcgaggttatagcctcctatgcccacttatgccgtaccaacggcgtctgcgtggattggcggacgcctgatttttgtgcaatgtcatgcccccccagtctcgtgtataaccactgcgagcacggctgtccccgacattgcgacggcaacgttagctcctgcggcgaccacccttccgagggatgtttttgccccccagataaggtgatgctagaaggatcatgcgttccagaagaggcctgcactcagtgcatcggcgaggatggcgtgcagcatcagttcctggaggcctgggtgccggaccatcaaccctgtcagatctgcacctgcctgtccggcaggaaagtcaattgtaccacccagccctgccccacagccaaagccccaacatgcggtttgtgcgaggtggcgaggctccgccagaacgcggaccagtgttgcccagagtacgaatgtgtgtgtgacccagtttcatgcgatctgcccccagttccgcactgcgagcgtggactgcagcccactctcacgaaccccggggagtgccggccgaactttacgtgcgcttgccggaaagaggagtgcaagagggtgagccctccatcctgtccgccccataggctcccgactctgcgaaagactcaatgctgcgatgagtacgagtgcgcgtgcaattgtgtcaatagcactgtatcttgccccttggggtacctagcctctacggccactaacgattgcggttgtaccaccacgacctgcctaccggacaaggtgtgcgtgcatcgatccaccatatatccagtcggccagttttgggaagagggctgcgatgtgtgtacatgcacagatatggaggatgctgtcatgggtctgcgggtggctcaatgctcacagaaaccgtgcgaagatagctgcaggtccgggttcacgtacgttcttcatgagggcgagtgttgcggccggtgcttgccaagtgcgtgtgaggtcgtgacgggatcgccgcgcggtgatagtcaatcgtcgtggaaaagtgtgggcagccaatgggcgtcaccagagaacccgtgtctcatcaatgagtgcgttcgggtgaaggaggaggtgtttatccagcagcgcaatgtctcgtgtccccagttggaggtgccggtgtgcccgtctggtttccaactaagctgtaagacctccgcatgttgtcccagctgccgctgcgagcgaatggaggcttgcatgcttaatgggaccgtgattggacccggcaagacagtgatgatcgatgtgtgcacgacatgtaggtgtatggtgcaagtcggagtaatctctggattcaagttggagtgccgcaagactacctgcaacccgtgccccctgggttataaggaggagaataacaccggtgagtgttgcggacgctgcctgccaacagcgtgcaccatccagctccgaggaggccagataatgacgttgaaacgtgatgagacgctgcaggatggatgcgacacgcacttctgcaaggtgaacgaaagaggtgaatacttctgggagaagagagtgacaggatgtccaccgttcgatgaacacaagtgcctcgcggagggcggtaaaatcatgaaaatacccggcacctgttgcgacacatgcgaggagcccgagtgcaacgacatcaccgcccgccttcagtacgttaaggtcgggtcttgtaagtcggaggtggaggtggatatacactattgtcagggcaaatgtgcctccaaggccatgtactcgatcgacatcaacgatgtacaggatcagtgctcatgctgcagcccgacgcgcactgaacccatgcaggttgctctgcactgcactaatggaagcgtcgtctaccacgaggtgcttaatgccatggaatgcaagtgttcaccacgtaaatgctctaag

SEQ ID NO: 21418 - DNA, 8439 bp, synthetic construct
  misc_feature 1..8439: note = source = /note="Description of Artificial Sequence: Synthetic coding sequence"
  source 1..8439: mol_type = other DNA
atgataccggcgcgatttgcgggtgttctattagcgttagcgttaatactaccgggtacgttatgtgcggaaggtacgcgaggtcgatcgtcgacggcgcgttgttcgctatttggttcggattttgtaaatacgtttgatggttcgatgtattcgtttgcgggttattgttcgtatctactagcgggtggttgtcaaaaacgttcgttttcgataataggtgattttcaaaatggtaaacgtgtatcgctatcggtttatttaggtgaattttttgatatacatctatttgtaaatggtacggtaacgcaaggtgatcaacgagtttcgatgccgtatgcgtcgaaaggtctatatctagaaacggaagcgggttattataaattatcgggtgaagcgtatggttttgttgcgcgtatagatggttcgggtaattttcaagtattattatcggatcgatattttaataaaacgtgtggtttatgtggtaattttaatatatttgcggaagatgattttatgacgcaagaaggtacgctaacgtcggatccgtatgattttgcgaattcgtgggcgctatcgtcgggtgaacaatggtgtgaacgagcgtcgccgccgtcgtcgtcgtgtaatatatcgtcgggtgaaatgcaaaaaggtttatgggaacaatgtcaattactaaaatcgacgtcggtatttgcgcgttgtcatccgctagtagatccggaaccgtttgttgcgttatgtgaaaaaacgctatgtgaatgtgcgggtggtttagaatgtgcgtgtccggcgctattagaatatgcgcgaacgtgtgcgcaagaaggtatggtactatatggttggacggatcattcggcgtgttcgccggtatgtccggcgggtatggaatatcgacaatgtgtttcgccgtgtgcgcgtacgtgtcaatcgctacatataaatgaaatgtgtcaagaacgatgtgttgatggttgttcgtgtccggaaggtcaattactagatgaaggtttatgtgtagaatcgacggaatgtccgtgtgtacattcgggtaaacgatatccgccgggtacgtcgttatcgcgtgattgtaatacgtgtatatgtcgtaattcgcaatggatatgttcgaatgaagaatgtccgggtgaatgtctagttacgggtcaatcgcattttaaatcgtttgataatcgttattttacgttttcgggtatatgtcaatatctattagcgcgtgattgtcaagatcattcgttttcgatagtaatagaaacggtacaatgtgcggatgatcgagatgcggtatgtacgcgatcggtaacggttcgactaccgggtttacataattcgttagttaaactaaaacatggtgcgggtgtagcgatggatggtcaagatgttcaattaccgctactaaaaggtgatttacgtatacaacatacggttacggcgtcggttcgtctatcgtatggtgaagatttacaaatggattgggatggtcgtggtcgtttattagtaaaactatcgccggtttatgcgggtaaaacgtgtggtttatgtggtaattataatggtaatcaaggtgatgattttctaacgccgtcgggtttagcggaaccgcgtgtagaagattttggtaatgcgtggaaattacatggtgattgtcaagatctacaaaaacaacattcggatccgtgtgcgctaaatccgcgtatgacgcgattttcggaagaagcgtgtgcggtattaacgtcgccgacgtttgaagcgtgtcatcgtgcggtatcgccgttaccgtatctacgtaattgtcgttatgatgtatgttcgtgttcggatggtcgagaatgtttatgtggtgcgttagcgtcgtatgcggcggcgtgtgcgggtcgaggtgtacgtgtagcgtggcgtgaaccgggtcgatgtgaattaaattgtccgaaaggtcaagtatatctacaatgtggtacgccgtgtaatttaacgtgtcgttcgctatcgtatccggatgaagaatgtaatgaagcgtgtctagaaggttgtttttgtccgccgggtttatatatggatgaacgtggtgattgtgtaccgaaagcgcaatgtccgtgttattatgatggtgaaatatttcaaccggaagatatattttcggatcatcatacgatgtgttattgtgaagatggttttatgcattgtacgatgtcgggtgttccgggttcgttattaccggatgcggtactatcgtcgccgctatcgcatcgatcgaaacgttcgctatcgtgtcgaccgccgatggtaaaactagtttgtccggcggataatttacgagcggaaggtttagaatgtacgaaaacgtgtcaaaattatgatttagaatgtatgtcgatgggttgtgtttcgggttgtttatgtccgccgggtatggttcgtcatgaaaatcgatgtgtagcgttagaacgatgtccgtgttttcatcaaggtaaagaatatgcgccgggtgaaacggtaaaaataggttgtaatacgtgtgtttgtcaagatcgaaaatggaattgtacggatcatgtatgtgatgcgacgtgttcgacgataggtatggcgcattatctaacgtttgatggtctaaaatatctatttccgggtgaatgtcaatatgtattagtacaagattattgtggttcgaatccgggtacgtttcgaatactagttggtaataaaggttgttcgcatccgtcggttaaatgtaaaaaacgtgttacgatattagtagaaggtggtgaaatagaattatttgatggtgaagtaaatgtaaaacgaccgatgaaagatgaaacgcattttgaagtagttgaatcgggtcgttatataatattattattaggtaaagcgctatcggtagtatgggatcgacatttatcgatatcggttgttctaaaacaaacgtatcaagaaaaagtatgtggtttatgtggtaattttgatggtatacaaaataatgatttaacgtcgtcgaatttacaagtagaagaagatccggtagattttggtaattcgtggaaagtttcgtcgcaatgtgcggatacgcgaaaagtaccgctagattcgtcgccggcgacgtgtcataataatataatgaaacaaacgatggtagattcgtcgtgtcgtatactaacgtcggatgtttttcaagattgtaataaattagtagatccggaaccgtatctagatgtatgtatatatgatacgtgttcgtgtgaatcgataggtgattgtgcgtgtttttgtgatacgatagcggcgtatgcgcatgtttgtgcgcaacatggtaaagtagttacgtggcgtacggcgacgctatgtccgcaatcgtgtgaagaacgtaatttacgagaaaatggttatgaatgtgaatggcgatataattcgtgtgcgccggcgtgtcaagttacgtgtcaacatccggaaccgttagcgtgtccggttcaatgtgtagaaggttgtcatgcgcattgtccgccgggtaaaatactagatgaactattacaaacgtgtgtagatccggaagattgtccggtatgtgaagttgcgggtcgtcgatttgcgtcgggtaaaaaagttacgttaaatccgtcggatccggaacattgtcaaatatgtcattgtgatgtagtaaatttaacgtgtgaagcgtgtcaagaaccgggtggtctagttgttccgccgacggatgcgccggtatcgccgacgacgctatatgtagaagatatatcggaaccgccgttacatgatttttattgttcgcgactactagatctagtttttttattagatggttcgtcgcgtttatcggaagcggaatttgaagtattaaaagcgtttgttgtagatatgatggaacgtctacgtatatcgcaaaaatgggttcgagttgcggtagttgaatatcatgatggttcgcatgcgtatataggtttaaaagatcgtaaacgaccgtcggaattacgacgaatagcgtcgcaagtaaaatatgcgggttcgcaagttgcgtcgacgtcggaagttttaaaatatacgttatttcaaatattttcgaaaatagatcgtccggaagcgtcgcgtataacgttactactaatggcgtcgcaagaaccgcaacgaatgtcgcgaaattttgtacgatatgtacaaggtttaaaaaaaaaaaaagtaatagtaataccggttggtataggtccgcatgcgaatttaaaacaaatacgtctaatagaaaaacaagcgccggaaaataaagcgtttgtactatcgtcggttgatgaattagaacaacaacgtgatgaaatagtatcgtatctatgtgatctagcgccggaagcgccgccgccgacgttaccgccggatatggcgcaagtaacggtaggtccgggtctattaggtgtatcgacgttaggtccgaaacgaaattcgatggttttagatgtagcgtttgttctagaaggttcggataaaataggtgaagcggattttaatcgttcgaaagaatttatggaagaagtaatacaacgtatggatgttggtcaagattcgatacatgtaacggttctacaatattcgtatatggttacggtagaatatccgttttcggaagcgcaatcgaaaggtgatatattacaacgtgtacgtgaaatacgatatcaaggtggtaatcgtacgaatacgggtctagcgttacgttatttatcggatcattcgtttctagtatcgcaaggtgatcgagaacaagcgccgaatttagtttatatggttacgggtaatccggcgtcggatgaaataaaacgattaccgggtgatatacaagtagtaccgataggtgtaggtccgaatgcgaatgtacaagaattagaacgaataggttggccgaatgcgccgatactaatacaagattttgaaacgctaccgcgagaagcgccggatctagttttacaacgttgttgttcgggtgaaggtctacaaataccgacgctatcgccggcgccggattgttcgcaaccgctagatgttatactattattagatggttcgtcgtcgtttccggcgtcgtattttgatgaaatgaaatcgtttgcgaaagcgtttatatcgaaagcgaatataggtccgcgactaacgcaagtatcggttctacaatatggttcgataacgacgatagatgttccgtggaatgttgtaccggaaaaagcgcatttactatcgttagtagatgtaatgcaacgtgaaggtggtccgtcgcaaataggtgatgcgctaggttttgcggtacgttatttaacgtcggaaatgcatggtgcgcgaccgggtgcgtcgaaagcggtagtaatattagtaacggatgtatcggtagattcggtagatgcggcggcggatgcggcgcgttcgaatcgagtaacggtatttccgataggtataggtgatcgatatgatgcggcgcaactacgtatactagcgggtccggcgggtgattcgaatgtagtaaaactacaacgaatagaagatttaccgacgatggtaacgctaggtaattcgtttttacataaattatgttcgggttttgtacgtatatgtatggatgaagatggtaatgaaaaacgtccgggtgatgtatggacgttaccggatcaatgtcatacggttacgtgtcaaccggatggtcaaacgttattaaaatcgcatcgagtaaattgtgatcgtggtctacgtccgtcgtgtccgaattcgcaatcgccggttaaagtagaagaaacgtgtggttgtcgttggacgtgtccgtgtgtatgtacgggttcgtcgacgcgacatatagttacgtttgatggtcaaaattttaaattaacgggttcgtgttcgtatgtactatttcaaaataaagaacaagatttagaagttatattacataatggtgcgtgttcgccgggtgcgcgtcaaggttgtatgaaatcgatagaagttaaacattcggcgttatcggtagaattacattcggatatggaagtaacggttaatggtcgtttagtatcggttccgtatgttggtggtaatatggaagttaatgtttatggtgcgataatgcatgaagtacgttttaatcatctaggtcatatatttacgtttacgccgcaaaataatgaatttcaactacaattatcgccgaaaacgtttgcgtcgaaaacgtatggtttatgtggtatatgtgatgaaaatggtgcgaatgattttatgttacgagatggtacggttacgacggattggaaaacgttagtacaagaatggacggtacaacgtccgggtcaaacgtgtcaaccgatactagaagaacaatgtctagtaccggattcgtcgcattgtcaagttctattattaccgctatttgcggaatgtcataaagtactagcgccggcgacgttttatgcgatatgtcaacaagattcgtgtcatcaagaacaagtttgtgaagttatagcgtcgtatgcgcatttatgtcgtacgaatggtgtttgtgttgattggcgaacgccggatttttgtgcgatgtcgtgtccgccgtcgttagtatataatcattgtgaacatggttgtccgcgtcattgtgatggtaatgtatcgtcgtgtggtgatcatccgtcggaaggttgtttttgtccgccggataaagtaatgttagaaggttcgtgtgttccggaagaagcgtgtacgcaatgtataggtgaagatggtgtacaacatcaatttttagaagcgtgggtaccggatcatcaaccgtgtcaaatatgtacgtgtctatcgggtcgtaaagtaaattgtacgacgcaaccgtgtccgacggcgaaagcgccgacgtgtggtctatgtgaagttgcgcgtctacgtcaaaatgcggatcaatgttgtccggaatatgaatgtgtatgtgatccggtttcgtgtgatctaccgccggttccgcattgtgaacgtggtttacaaccgacgctaacgaatccgggtgaatgtcgtccgaattttacgtgtgcgtgtcgtaaagaagaatgtaaacgagtatcgccgccgtcgtgtccgccgcatcgtctaccgacgttacgtaaaacgcaatgttgtgatgaatatgaatgtgcgtgtaattgtgttaattcgacggtttcgtgtccgttaggttatctagcgtcgacggcgacgaatgattgtggttgtacgacgacgacgtgtttaccggataaagtatgtgtacatcgatcgacgatatatccggtaggtcaattttgggaagaaggttgtgatgtatgtacgtgtacggatatggaagatgcggttatgggtctacgagttgcgcaatgttcgcaaaaaccgtgtgaagattcgtgtcgttcgggttttacgtatgtattacatgaaggtgaatgttgtggtcgatgtttaccgtcggcgtgtgaagtagtaacgggttcgccgcgtggtgattcgcaatcgtcgtggaaatcggtaggttcgcaatgggcgtcgccggaaaatccgtgtctaataaatgaatgtgttcgtgtaaaagaagaagtatttatacaacaacgtaatgtatcgtgtccgcaattagaagtaccggtttgtccgtcgggttttcaattatcgtgtaaaacgtcggcgtgttgtccgtcgtgtcgatgtgaacgaatggaagcgtgtatgttaaatggtacggtaataggtccgggtaaaacggtaatgatagatgtatgtacgacgtgtcgttgtatggttcaagtaggtgtaatatcgggttttaaactagaatgtcgtaaaacgacgtgtaatccgtgtccgttaggttataaagaagaaaataatacgggtgaatgttgtggtcgatgtttaccgacggcgtgtacgatacaattacgaggtggtcaaataatgacgctaaaacgtgatgaaacgttacaagatggttgtgatacgcatttttgtaaagttaatgaacgaggtgaatatttttgggaaaaacgtgtaacgggttgtccgccgtttgatgaacataaatgtttagcggaaggtggtaaaataatgaaaataccgggtacgtgttgtgatacgtgtgaagaaccggaatgtaatgatataacggcgcgattacaatatgttaaagtaggttcgtgtaaatcggaagtagaagttgatatacattattgtcaaggtaaatgtgcgtcgaaagcgatgtattcgatagatataaatgatgtacaagatcaatgttcgtgttgttcgccgacgcgtacggaaccgatgcaagttgcgttacattgtacgaatggttcggtagtttatcatgaagtattaaatgcgatggaatgtaaatgttcgccgcgtaaatgttcgaaa

SEQ ID NO: 21419 - DNA, 8439 bp, synthetic construct
  misc_feature 1..8439: note = source = /note="Description of Artificial Sequence: Synthetic coding sequence"
  source 1..8439: mol_type = other DNA
atgattcccgcacgtttcgctggtgttttgctagccctcgctctgattcttcctggcaccctttgcgcagaagggacgagggggcggagcagtacagccaggtgtagcctgtttggatcagatttcgttaacaccttcgacggcagtatgtattcgtttgccggctactgttcgtacctccttgctggtggatgtcagaagcggtcctttagtatcatcggcgactttcaaaatgggaaacgcgtgagtttgtccgtctacttaggcgagttttttgacattcatttgtttgtgaatggtacagtaactcagggggaccaaagggtcagtatgccctatgcatcaaaaggtttgtatctggagacagaggcagggtattacaaattatcaggcgaagcgtacggattcgtcgcacgaattgacggttctggcaattttcaagtgctgctcagcgaccgatactttaacaaaacatgcggcctgtgcggaaatttcaatatctttgccgaggacgatttcatgactcaagagggaacactaaccagtgacccctatgacttcgctaacagctgggccctctcatctggtgaacagtggtgcgagagagcaagtccaccatcttcttcctgtaacatctcctccggagaaatgcagaagggactgtgggaacagtgtcagctccttaaatctaccagcgtctttgcgcggtgtcaccccttggtggatcccgagcccttcgtggcactttgtgagaaaaccctgtgtgaatgtgctggtggactggagtgtgcctgtcccgccctgttagagtatgcgcgcacctgcgcccaggagggcatggtgctgtacgggtggacagatcacagcgcttgcagtccagtatgtccagccgggatggaatataggcaatgcgtgagcccctgtgccaggacctgccagagcctgcacatcaacgagatgtgtcaggagaggtgcgtggatggttgctcatgccctgagggccaacttctcgatgagggattgtgtgtggagagcacagagtgtccatgtgtgcactccggaaaacgctacccccccggaacttcactctctcgcgattgcaatacatgcatctgtaggaactctcagtggatttgttctaacgaagaatgtccaggtgaatgcctggtgaccggacaatcccactttaagagcttcgacaatcgctacttcaccttcagtggaatttgtcagtatctgctagcccgggattgccaggaccactcttttagcatcgtgattgagacagtgcagtgcgcggacgatagggacgcagtatgtaccaggagcgtaactgtccgcctgccagggctgcacaacagtttggttaagttgaaacatggcgcaggcgtcgcaatggacggtcaggacgtgcagttgcctctgttgaagggcgacctgcggatacaacataccgtgactgcgtctgttaggctgagttatggagaagacctgcaaatggattgggacggcaggggaaggttgctcgtcaaattgagtcctgtctatgccggcaagacatgtggtctctgtgggaattataatggtaaccagggggacgacttcctgacgccctcaggcctcgccgagcccagagttgaggactttgggaacgcatggaaactgcatggagattgccaggatcttcagaagcagcatagtgatccttgcgcgttgaatcccagaatgaccaggttctctgaagaagcttgcgcggtgctcacaagcccaactttcgaggcatgtcatcgcgctgtcagtcctctgccttatctgcggaactgcagatacgacgtgtgctcttgtagcgatggcagggagtgcctttgcggtgctctggccagttatgctgcggcatgcgccgggagaggtgtcagagttgcttggcgtgaacctggccggtgcgagctgaattgcccgaaaggacaagtgtatctgcagtgcggtacaccttgtaacctgacatgtcgcagcctttcatatccagatgaggaatgtaacgaggcatgtctcgaaggatgtttctgccctccagggctgtacatggacgagcgcggcgattgcgtgcccaaggcccagtgcccatgctactatgacggcgagatctttcaaccagaggacatattctctgaccatcatacaatgtgctactgcgaggatggcttcatgcactgtactatgtctggcgttcctggctcactgctgccggatgccgttttatcttcccccttatcacacaggagtaagaggagcctctcctgtagaccacctatggtgaaacttgtctgtcctgccgataacctcagggccgaaggcctggagtgtactaaaacatgtcagaactacgacctggaatgcatgtcgatggggtgcgtcagtggatgtctctgtccacctgggatggtgaggcacgaaaataggtgtgtcgctctggagcggtgcccttgtttccatcaggggaaggagtatgctcctggcgagacagtcaagattggctgcaatacttgcgtgtgtcaggataggaagtggaactgcacagatcatgtgtgtgacgctacatgctcgacaattggcatggcgcattatctgacttttgatggtctcaagtatctgttccccggcgagtgccagtacgtgctcgtgcaggattattgtgggtcaaatcctgggacgtttcgcatccttgtggggaacaaaggttgttctcaccctagcgtgaaatgcaaaaagagagtaaccatactcgtggaaggaggcgaaattgagctctttgatggcgaagtaaatgtgaaacgtccgatgaaggacgaaacccacttcgaggtggtcgaatccggaaggtacattattttgttgcttggtaaagctcttagcgtggtgtgggacaggcacctgtcgatcagtgtggtgctcaaacaaacgtatcaggagaaagtgtgtggcctctgcggaaattttgatggtatccagaataatgacctgacctctagcaatctgcaggtcgaggaagaccctgtggactttggtaattcatggaaggtatcttcacagtgtgcagatacacgaaaagtgcctctagatagctctcctgcaacctgccataataatattatgaaacaaacaatggttgatagctcttgcaggattctgactagtgacgtgttccaggattgcaacaaattagtcgacccagagccatatttagatgtctgcatctacgacacctgtagttgtgaaagcatcggggactgtgcctgcttctgcgatactattgcagcatatgcccacgtgtgtgctcagcatgggaaggttgtgacctggcggacggctacactgtgtccccagtcttgtgaagagagaaacctgagggagaacgggtacgagtgcgagtggagatacaattcttgtgcaccggcgtgtcaggtaacctgtcagcatcccgagcccctggcctgccccgtgcagtgtgttgaggggtgtcacgcgcattgcccccccggaaaaattctggacgaacttctccaaacttgcgtagatccggaggattgtcccgtctgtgaggtggcaggccgccgattcgcctctggtaagaaggtcacactgaatccttccgatcccgagcattgtcagatttgccactgtgacgtggttaacctgacctgtgaggcatgtcaagagcctgggggcctggtcgtcccaccaacagacgcccctgtttcacccacgaccctctatgtggaggacatttccgaacctcctctccacgacttctactgctctcgactacttgacctcgtgtttctgctggatggaagtagcaggctcagtgaggccgagttcgaggtcttgaaggccttcgtggtcgacatgatggagcggctgcgaatcagccagaagtgggttcgcgtcgcagttgtagagtatcatgatgggagccacgcatacatcggcctgaaagaccgaaagaggccatcagaactgaggcggatagcctcccaggttaagtatgccggctcacaggtcgcaagtacgtctgaagttctcaagtataccctgttccagattttcagtaaaatcgacaggcctgaggcctctcgaatcaccctgttattgatggcgtctcaggagccccagcgaatgagccgtaacttcgtccggtatgtgcaggggcttaaaaagaagaaggtcatcgtcatccccgttggtatcggcccgcacgcgaacctcaagcaaatccgcttgatcgaaaagcaggccccagagaataaggccttcgtcctatctagtgttgacgagctggagcagcagcgggacgaaatcgtgtcctatctctgtgatctcgcaccagaggcaccccctcccaccctgccacctgatatggcccaggtcaccgtgggcccagggctcttgggggtcagcacactgggacccaagcgcaactcaatggtcttggacgtggctttcgtgctggagggcagtgacaagatcggcgaggcggactttaacaggtccaaggaattcatggaagaagttatacagagaatggacgtagggcaggacagtattcacgtcacagtgctgcaatacagttatatggtgaccgtcgagtacccattttccgaagcacagagcaagggggatattctgcagagagtacgtgagattaggtaccagggcggcaaccgcactaacacaggccttgcactgcgttatttgtcggaccactctttccttgtgtcccagggagacagagagcaggcccctaatctcgtgtatatggtgactgggaaccctgcaagcgatgagataaagcggttgccaggggatatccaagttgtacccattggggtggggcctaatgctaacgttcaggagcttgagcggattggatggcccaatgcacctattctgatacaggattttgagaccttacctagagaggctcctgacctggttctacagcgatgctgtagtggtgagggcctccagattcctacccttagcccggcgccagattgctctcaacctctggatgtcatcttgctcctcgatgggtcctcaagctttcccgcgtcttatttcgatgagatgaagagttttgcaaaagcgtttatatccaaggccaatatcgggcccagactgacgcaggtatctgtcctgcagtacggatccatcactacaatcgacgtgccatggaatgtggtgcccgagaaagctcatctgttgtctctggtcgacgtgatgcagagggagggcggtccaagccagatcggggacgctctgggcttcgcggtccggtacctcacaagcgaaatgcacggcgcccgccccggggctagcaaagccgtggttatcctggttacagacgtgagcgttgactccgtggatgctgcagcagatgccgcccgatccaatcgtgtgaccgtattccctatcggtatcggagatagatacgacgctgcacagctccggatcctggccggacctgctggagacagcaacgttgtgaaattacagcggatcgaagacctcccaaccatggtaactttagggaatagttttttgcataagctgtgcagcggtttcgtcaggatctgtatggatgaggatgggaacgaaaaacggcccggtgatgtctggactctgcccgatcagtgtcatactgtaacttgtcagcccgatggacaaacactcctgaaaagccatagagttaattgcgacagggggctgcggccctcctgccccaatagccagagtccagtgaaagtcgaggaaacttgtggatgcagatggacatgtccctgcgtctgcactggcagttcaactaggcacatcgtcactttcgacggtcaaaattttaagctgactgggtcctgctcctacgtcttatttcagaacaaagaacaggatctggaggtgattctgcacaatggcgcatgcagtcctggggcgaggcagggatgtatgaagtctatcgaggttaagcactccgccctttcggtggagctgcattccgacatggaagtgactgtgaatggaagattggtctccgtcccctatgtgggtggaaacatggaagttaacgtgtacggcgcaattatgcacgaagtacggtttaaccacctgggccacatttttaccttcaccccacagaacaatgagtttcagctgcagctctcccctaagacctttgccagtaagacatacggcttgtgcggtatatgcgacgaaaacggcgcgaacgacttcatgctgagggacggcacggtgaccaccgattggaaaacactggtgcaggaatggacagtccagcggccaggccagacatgtcagcctattcttgaagagcagtgtctggtccccgattcctcccattgccaggtgctgcttctgcctctgttcgcagagtgccacaaagtgcttgccccggccacattctatgccatttgccaacaagattcctgccatcaagagcaggtgtgcgaggtgatagcctcatacgcccacctgtgccggacaaatggggtgtgcgtagattggagaacaccagacttctgtgcgatgtcctgcccgcctagcctggtttacaaccactgcgagcacgggtgcccccgccactgtgacggcaacgtgtctagttgcggagaccacccctcagaaggctgtttctgtccacctgacaaggttatgctggagggttcctgtgtgcctgaagaggcatgtacacagtgcattggagaggatggggtccaacatcagttcctggaggcttgggtgccagaccatcagccatgccaaatatgcacctgtctgtctggccgcaaggttaactgtacgactcagccatgtcccactgccaaagctccaacctgcggattgtgcgaggtagctcggctcagacagaacgcagatcagtgctgtccagaatacgagtgcgtctgtgaccctgtgtcatgtgatttaccacccgtgcctcactgcgaaagggggctgcagccgacccttactaatcccggggagtgccggcctaatttcacgtgtgcatgtagaaaagaagaatgtaaacgcgtctccccgccatcctgtccgccgcaccgtctgcctactcttaggaaaactcagtgttgcgacgagtatgaatgcgcctgtaactgtgtgaacagtactgtatcttgcccattggggtaccttgcatctaccgctaccaacgattgtggatgtaccacgaccacctgcctcccggacaaagtgtgcgtgcaccgaagcactatctatcccgtagggcagttctgggaggagggctgtgacgtctgcacatgcactgacatggaggatgccgtgatggggctacgggtagcgcagtgctcccaaaagccctgcgaggattcttgtcgttccgggtttacatacgtgctgcatgagggggagtgttgtggacgatgcctcccatccgcatgtgaggtggtgacagggagtccgcgtggggatagtcagtcctcgtggaaaagtgttggatcccagtgggcaagcccggagaatccatgcctgatcaacgaatgcgttcgggtcaaggaagaggtcttcatccagcagaggaatgtgtcctgcccccagctcgaagtccctgtgtgtccgtccgggttccagcttagctgtaagacgtccgcctgttgtccaagttgcaggtgcgagcgcatggaagcctgtatgctgaatggaacagtgattggccctggaaagacagtgatgatcgacgtttgcacaacttgtaggtgtatggtccaggtgggcgtaatcagcggcttcaagctggagtgcagaaaaaccacttgtaatccttgtccattagggtacaaagaagagaataataccggcgagtgctgtggtaggtgcctcccaacagcatgtactatccagctgaggggaggacaaatcatgacgcttaaaagagatgagactctccaggacggctgtgatacccatttctgcaaggtaaatgagagaggagagtacttctgggaaaagcgtgtgactgggtgtcctccctttgatgagcacaaatgtttggcggaagggggcaagattatgaagattccgggcacatgctgcgatacctgtgaagagcccgaatgtaacgacattactgctagactccagtacgtgaaagttggcagttgtaagtctgaggtcgaagtggatattcactattgtcagggcaaatgcgcctccaaggctatgtattcgatagacatcaacgacgttcaggaccagtgttcatgttgttctcctacgcgcacagaacctatgcaggtggcgctgcactgcacaaatggttcggtcgtgtatcatgaggtgctcaacgccatggaatgcaagtgttccccacgcaaatgctccaag

SEQ ID NO: 21420 - DNA, 8439 bp, synthetic construct
  misc_feature 1..8439: note = source = /note="Description of Artificial Sequence: Synthetic coding sequence"
  source 1..8439: mol_type = other DNA
atgatcccagcccgtttcgcgggagttctgttagctctggccctgattctgcctggcaccctgtgtgccgaagggacaagggggcgatcttccacagctagatgtagtctgtttggctccgacttcgtaaacaccttcgacggtagcatgtactcatttgctggctactgttcctatttgctcgcgggaggctgtcaaaaaaggtcattctccattattggtgattttcagaatgggaaaagggtctccttgtcagtttatctgggagaattttttgacatacacttgtttgtgaacggcacagtgacccagggcgaccaacgggtctccatgccatacgctagcaagggcctatatctggagacagaagcagggtattacaagctatctggggaagcatacggcttcgtggcacgcatcgacgggtcaggaaattttcaggtattgctgagtgacagatatttcaataagacctgcggcctctgcggcaattttaatatattcgcagaagatgattttatgacccaggaagggacactcacctcggatccctacgattttgctaattcctgggccttgagctcaggcgagcagtggtgtgaaagggctagccccccctcaagttcatgcaatatttctagcggcgagatgcagaaagggctttgggaacagtgccagctgctgaaaagcacaagcgttttcgctaggtgccatcctctggtggatcctgagccttttgttgctctgtgcgagaagaccctctgcgagtgtgcgggcgggctggagtgtgcttgccctgctctgttggaatacgcgcgcacgtgtgctcaggaaggaatggtcctttatgggtggaccgatcattctgcatgctcccctgtgtgtccggccggtatggagtatcgacaatgcgtttccccgtgtgccagaacgtgtcagagcctgcacatcaacgagatgtgtcaggaaaggtgcgtggacggatgttcttgccccgagggccagcttctcgacgaaggcttgtgtgtagagtctactgaatgtccttgtgtccatagcggtaagcggtacccacctgggaccagcctatccagggactgtaatacctgcatctgcaggaactctcaatggatttgtagcaacgaggaatgccctggtgagtgtctggtgactggccagtcccatttcaaatcattcgacaatcgttatttcaccttctctggcatttgtcagtatctgctagcacgcgactgccaagatcattcgttcagcatcgtgatcgagactgttcaatgtgctgatgatcgcgacgcggtgtgtactcgcagtgtcactgtgagattgcccgggctccacaactccctcgttaagctaaagcacggcgccggcgtggctatggacggacaggatgtacaactcccccttctcaaaggagacttgaggattcagcatacagtgactgctagcgtgcggctaagttacggcgaagatctgcagatggactgggatgggagggggcgactcttagtcaaactttcacctgtgtatgccggcaagacctgtggattgtgtggaaattataatggaaaccagggagatgatttccttactccgtctggactggccgaaccacgcgtcgaggatttcggaaatgcttggaagctgcacggagattgtcaggaccttcagaagcagcattccgatccatgtgcacttaacccaagaatgacaagattctctgaggaggcttgcgccgtgttaacttcacccacctttgaagcctgtcatcgggcagtgtctcctttgccttacttgcgaaattgccggtacgatgtttgttcttgttcagacggccgcgagtgtctctgcggtgcgctggcatcttatgcggctgcatgcgcgggaaggggcgtcagggtggcttggcgtgagccggggagatgcgagctaaactgccctaaaggacaggtgtacctgcagtgtggcaccccctgcaatctgacctgcaggtcattgagttatcccgacgaggagtgtaacgaagcgtgcctggagggatgcttttgccctcccggactgtatatggacgaacgcggcgattgcgtgcccaaagctcagtgtccgtgttactacgatggcgaaatattccagcctgaggacatcttttccgaccatcacacaatgtgctactgtgaagatggtttcatgcactgtacaatgtctggggtgcctgggagcctactgccggacgctgtgctgagtagccccctgagtcacaggtctaagcggagtctgtcatgtaggccaccgatggtcaagctcgtctgtcccgctgataatctgcgcgcggagggccttgagtgtaccaaaacttgccagaattacgacctagagtgcatgtcgatgggatgcgtctcgggttgcctctgcccaccaggcatggtgcgacacgagaaccgatgcgtggctctggaacggtgcccctgtttccatcaaggaaaagaatacgcccccggtgagaccgtgaagataggatgtaacacatgtgtgtgccaggatagaaagtggaactgcacagaccacgtgtgcgacgctacatgttcgacgattggtatggctcactacttgacatttgacgggttaaaatatttgttccctggcgaatgtcagtatgtacttgtgcaagactactgcggaagcaatccaggaacgttccgaatcctagtagggaacaagggatgtagccatcctagcgtgaagtgtaagaagagagtaaccatcttggtggagggaggagaaatcgagctctttgatggagaggtgaacgtgaagcggcctatgaaggatgagacccatttcgaggtggtagaaagcggcagatacatcatcctcttactgggaaaagcattgtccgtcgtttgggataggcacctgagcatcagcgtggttctgaagcagacttaccaggagaaggtctgcggactttgcggcaatttcgacggcatccaaaacaacgatctgacctcttccaatctgcaggtagaggaagatccagtcgactttggcaattcctggaaagtctcctctcagtgcgctgatacgcgcaaggttccacttgactcatctcccgccacctgtcataacaacattatgaagcagaccatggtagattccagctgccgcatcctcacaagcgacgtgtttcaggactgcaataagctagtggatccagaaccctatctggacgtatgcatctacgatacgtgcagttgcgagtccattggcgactgcgcttgcttctgcgatacaatcgctgcctacgcccacgtgtgtgctcagcacgggaaggtagtaacctggcggacagctaccctgtgcccccagtcctgtgaagaacgcaatctgagggagaacggatatgagtgcgaatggagatataattcttgtgcaccggcctgtcaagtcacttgccaacacccagagcccttagcctgccccgtgcagtgcgtggagggctgccatgcacactgcccgcccggcaaaatactggacgagctacttcaaacctgtgtcgatccggaggattgtcccgtttgtgaggttgccggacgaagattcgcttccgggaaaaaggtgaccttgaacccaagcgacccagagcactgccaaatctgccactgtgacgtagtaaaccttacctgcgaagcctgccaggagcctggaggcttggtagtgccgcctacagatgcacctgtatcccccacaaccctctatgtagaagacatatctgagccgcccttgcatgacttctactgttctaggctgctcgaccttgtgtttctactggatggctccagtcgcttaagcgaggctgagtttgaagttctcaaggcattcgtcgtcgacatgatggaacggttgcggataagccagaaatgggtgcgcgtggctgtggtggagtatcacgacggtagccacgcttacataggcctaaaagataggaagaggccaagtgaactccgtcggatcgccagtcaagttaagtacgctggcagtcaggtcgcttctacatctgaagtcctgaaatacaccctgtttcagatcttctccaagattgacaggccggaggcatcgcggattactctcttgctcatggcatctcaagagccccagcgcatgtctcgtaattttgtgaggtatgtgcagggcctaaagaaaaaaaaagtgatagttattcctgtcggaataggtcctcacgccaacctgaagcagattcgattgatcgaaaagcaggctcctgagaataaagcatttgtcctctcgtcagtcgacgagctcgagcagcagagagatgagatcgtgtcatatttgtgtgaccttgcccccgaagctcccccgccaaccctgccccctgacatggcccaggtaacggtgggtccaggactactgggtgtttcgactctgggacccaagagaaactcaatggttctggacgtcgcattcgtgctggagggcagcgataaaatcggagaggcagattttaaccgcagcaaagagttcatggaggaggtcattcagcggatggacgtaggacaggatagcatccatgtaactgttcttcaatactcgtatatggtgaccgttgagtatccttttagcgaggcccaatccaagggggatattttgcagcgggttcgggagattaggtatcaggggggcaataggacaaataccggtctggccttgagatatcttagcgaccatagcttcctggtcagccagggagatcgggagcaagcccccaacctcgtgtatatggtgactggaaacccagcaagcgacgagattaaaagactgcctggggatatccaagtggtgcccatcggagtgggccctaacgctaatgtgcaggagctggaaagaatcggctggcccaacgctcctatactgatccaggattttgagacactgcctcgggaagctccggacctggtgctccagcgctgctgcagcggcgaaggcctacagataccaactctgagcccagccccggattgctctcagccgctggatgtcatactgcttttagacggctcatcctcttttccggcctcttattttgacgagatgaagtcgttcgctaaggcctttataagtaaggctaacattgggcctcggctcacgcaggtgagtgtgctccagtacggtagcatcactactatcgacgttccttggaatgtcgtgccagagaaggctcacctgttgtcccttgtagatgtgatgcagcgcgagggagggcctagccagatcggcgacgccctaggattcgccgttaggtatctgacaagtgagatgcacggagcacggcccggagcaagcaaagccgtggttatcctagtgactgatgtctccgtcgatagtgtcgacgcagctgccgatgccgcccggtcaaaccgcgttacggtgttcccgattgggattggtgacagatacgacgctgcgcagctcaggatcttggccgggcctgccggggactctaacgttgttaagctgcaacggattgaggacctgccaactatggtgactctaggtaattcattcctgcataaactttgttctggcttcgtgcgcatctgtatggatgaggacggaaatgagaagaggcccggcgacgtttggacactaccagaccagtgtcacacggtgacctgccagccagatggtcagaccctattgaagagccatagagtaaactgcgacaggggactgagaccgagctgtccaaacagccaatctccagtgaaggtagaggaaacctgcggatgtcggtggacctgtccatgtgtatgtacgggaagctcaacaaggcatatcgtcactttcgatggccagaacttcaagctcacgggctcttgttcatatgtgctcttccagaataaggagcaggatctggaggtgatactccacaacggggcttgctcgccaggcgcccggcaggggtgtatgaagtctatcgaagtgaaacactctgccctctctgtcgaactacatagtgacatggaggtgaccgtaaacggacgtctcgtgtctgttccttatgtgggcggtaatatggaagtgaatgtgtacggtgccattatgcatgaagtccggtttaaccatctgggacacatatttaccttcacaccgcaaaacaatgagttccagctgcaactctcccccaaaacttttgcgtcgaagacatacgggctatgcgggatttgcgatgagaacggagcgaatgacttcatgttgagggatggcaccgtgacaactgactggaagacactggtgcaggagtggactgtgcagcgccctggccagacctgccagcctatcctggaggagcagtgtttggttccagatagcagccactgtcaagttcttctcctgcctctgttcgccgagtgccataaagtccttgcgcccgccacgttttatgctatttgccaacaggacagttgtcaccaggagcaggtgtgtgaggtgatagcaagttacgcacacctctgtagaactaatggagtgtgcgttgactggaggactcctgacttctgcgccatgtcatgcccaccttcccttgtttacaatcactgtgagcatggttgcccccgccactgtgatgggaacgtctcttcttgtggggatcatcccagtgaggggtgcttctgcccaccagacaaggtgatgctggaggggtcatgtgtgcccgaagaggcttgcacccagtgcattggtgaggacggtgttcagcatcagttcttggaggcgtgggtgccagatcaccagccctgtcagatctgtacatgcctgtccggcaggaaagttaactgcacaacccaaccctgccccaccgccaaagctcctacctgtgggctgtgcgaggtcgctaggttaagacagaacgccgatcaatgctgcccggagtacgaatgtgtatgtgacccagtctcttgcgacctcccccccgtgcctcactgcgaacgggggctgcagcctacactcaccaaccctggcgagtgtcgccctaactttacctgtgcctgccggaaggaagaatgcaaacgggtgtccccaccctcatgtccaccccaccggcttcctactttgcggaagactcagtgttgcgacgaatatgagtgtgcttgcaactgtgtgaatagcactgtgagttgccctcttggataccttgcttcaacagctacgaatgactgcgggtgtactactactacgtgtctacctgataaagtatgcgtccacaggagcacaatctacccagtagggcagttttgggaagaaggctgcgatgtttgcacctgtaccgatatggaggacgctgtgatgggcctcagggttgcccaatgttcgcagaagccatgcgaagattcctgtaggagtggctttacctatgtgctgcatgagggtgagtgctgtggccgctgcctgccgagcgcctgcgaggttgtgaccggctctccaaggggcgattcacagtcttcctggaagagtgtgggatcccaatgggcctccccagagaatccttgcttgataaacgagtgcgtgagagtgaaggaggaagtcttcattcagcagcgcaacgtgtcctgtcctcaactggaagtgcccgtgtgcccaagtgggttccaactgagctgtaagacaagtgcatgctgtccctcatgtagatgtgagcgaatggaagcatgtatgctcaatgggacagtgatcggtccaggcaagactgtgatgattgacgtctgcaccacatgccgatgcatggtccaagtcggcgtgataagtggatttaaactggaatgtcggaagactacatgtaatccctgtccgctggggtacaaagaagaaaacaataccggagagtgctgcggacgctgcttgcctaccgcgtgcacaatccaactcaggggcggacagatcatgacattgaaaagagatgagaccctccaggatggctgtgatacccacttttgtaaggtcaacgagaggggagagtacttctgggagaaacgcgtcacgggctgtcccccatttgacgaacataaatgtctggccgaaggggggaaaatcatgaagattccgggaacctgttgtgatacctgcgaagagccagaatgcaacgatatcaccgctcggctccagtacgtgaaagtgggctcctgtaagtctgaggttgaagtggatatacactattgtcagggcaagtgcgcctctaaggctatgtactctattgatattaacgacgtgcaggaccagtgtagctgttgttcgcccacacgaacggagcccatgcaggtcgccctgcattgtaccaacgggtctgtagtgtaccacgaggtcttgaatgcgatggaatgtaagtgctccccacggaagtgttctaaa

SEQ ID NO: 21421 - DNA, 8439 bp, synthetic construct
  misc_feature 1..8439: note = source = /note="Description of Artificial Sequence: Synthetic coding sequence"
  source 1..8439: mol_type = other DNA
atgataccagcccgcttcgcaggcgttcttcttgccctggccctgattttgcccggcaccctctgcgccgagggcacaaggggtagatcttcaaccgctagatgctccctgttcggctcagatttcgtaaacaccttcgatggaagtatgtactctttcgccggttactgcagctaccttttggctggcggttgccagaagagaagcttttctataatcggagatttccagaacggaaaaagagtgtctctttcagtgtacctgggagagtttttcgatattcatctgttcgtcaacggtaccgtgacccagggtgaccagcgcgtctccatgccatacgcatctaaaggcctttacctcgagacagaggccggctactacaaattgtctggcgaagcttatggatttgtagctagaattgacggcagcggaaacttccaggtcctgctctctgatagatacttcaacaagacttgcggcctctgcggtaatttcaatatctttgccgaagatgacttcatgacccaggagggtactctgaccagcgacccttatgactttgcaaactcttgggctctttcttcaggtgagcagtggtgcgagcgtgcaagcccaccttcaagctcatgcaatataagcagcggagaaatgcaaaagggactgtgggagcaatgccaactcttgaagtctactagcgtttttgcccgttgccaccctctggtggatccagaacctttcgtcgcactctgtgaaaagacactctgcgagtgcgctggtggtcttgagtgcgcctgcccagccctgctggaatatgcaagaacatgcgctcaggaaggtatggtcctgtacggttggacagatcattcagcatgctcaccagtgtgcccagccggcatggagtatcgccaatgcgtgtcaccttgcgcacgtacatgccagtccttgcacatcaatgagatgtgtcaggagaggtgcgtggatggttgctcctgccccgaaggacagctcctcgatgagggactttgcgtcgagtctacagaatgcccctgtgtacactccggtaaaaggtatccaccaggtacttccttgtcaagagactgcaacacatgcatctgcaggaactcacagtggatatgttccaatgaggaatgtccaggtgagtgcctggtcaccggccaatcccactttaagagtttcgataaccgctacttcacattcagtggtatttgtcaatatctgctcgccagggactgccaagatcattcctttagcatcgtgatcgaaacagtacagtgcgccgacgaccgcgatgcagtatgcacccgctcagtgaccgtgcgtctgcccggtttgcataactctttggttaaactgaaacacggagctggcgtggctatggacggtcaggatgtgcagctgcccttgctgaagggtgaccttaggatccagcataccgtgactgcaagcgttaggctgagctatggagaagacctgcagatggactgggacggtagaggaaggcttttggtaaagctcagtccagtttacgccggcaagacctgcggcctctgcggaaattacaacggcaaccagggagacgacttcctcacccctagtggcctggccgagccaagggtcgaagatttcggaaacgcttggaagcttcacggtgactgccaagatttgcaaaagcaacactcagatccatgcgcactgaacccacgcatgacccgtttttcagaagaggcctgtgccgttctgacctcacccacatttgaggcttgccacagggctgtctcacctctgccatacctcaggaactgtcgttacgatgtctgctcctgcagtgacggccgtgaatgtctctgcggcgccctggcttcttatgctgccgcatgtgctggtaggggcgtccgcgtggcctggagggagcccggcaggtgtgaacttaactgtcctaaaggccaggtgtacctgcagtgtggaactccttgcaatttgacttgtaggagcctgagctatccagatgaagaatgcaacgaagcctgcctggaaggatgcttctgtcctccaggtttgtatatggacgagaggggtgattgcgtgccaaaggctcagtgtccatgctactacgacggagagatcttccaaccagaagatatcttcagtgatcatcacacaatgtgttactgcgaggacggtttcatgcactgtactatgtcaggagtgcccggttcccttctcccagacgcagttcttagcagccccctgtcacataggtccaagcgtagtctgtcttgcagaccaccaatggttaagttggtgtgccctgctgacaaccttagagccgagggattggagtgtacaaaaacatgccaaaattacgacctggaatgcatgtcaatgggatgtgtgagtggttgtctttgtccacccggtatggttaggcacgagaatcgttgcgtggcactggagaggtgtccctgcttccaccaaggtaaagaatatgctccaggagagaccgtgaagatcggttgcaatacttgtgtctgccaggaccgcaagtggaactgcaccgaccacgtttgtgatgctacctgctctaccatcggcatggcccactacctgacctttgacggcctgaagtacctgttccctggagaatgtcagtacgtgctggttcaggattattgcggcagcaacccaggcaccttcaggattcttgttggaaacaagggatgttctcatcctagcgtgaaatgtaagaagcgcgttacaatcttggtcgagggtggtgagatcgagctgttcgatggagaggtgaacgttaaacgtccaatgaaggatgagactcacttcgaggtggtggaatcaggaagatacatcatcctgctgttgggcaaggccttgtctgtagtgtgggaccgccatctcagcatctctgtggttcttaagcagacctatcaggagaaagtctgcggcctctgcggaaacttcgacggcatccagaacaacgatttgacctcttcaaacttgcaggtggaagaggacccagtggattttggtaacagctggaaggtgtcctctcaatgcgccgacactagaaaagtacccctggattcatctcccgcaacatgccataacaacatcatgaagcagacaatggtggatagcagctgcaggatcctgacctctgacgtatttcaggattgcaataagctggtagatccagagccatacctggacgtgtgtatttacgacacctgttcctgcgagtctatcggtgattgcgcttgcttttgcgatacaatcgccgcctacgcccatgtgtgtgcccagcatggtaaggtcgtcacttggagaacagccactctttgcccacagagctgcgaggagcgtaacttgcgcgaaaatggctacgaatgcgaatggaggtataactcttgtgctcccgcctgtcaggttacatgtcaacatccagagcctttggcttgcccagttcaatgtgtggaaggttgccacgctcactgccccccaggtaagatcctcgacgaattgctgcagacttgcgtggaccctgaggattgtccagtgtgcgaagtagctggtagacgcttcgcttccggcaaaaaggttaccctcaacccaagcgaccccgagcactgccagatttgccactgcgacgtggtaaacctgacctgcgaagcctgccaggaacctggtggcttggtggtgccacccactgacgccccagtttctccaactactctttacgtggaggatatttccgagcccccactgcacgacttctactgcagccgtttgctggacctcgtgtttctgctggacggtagcagtagactgagcgaggccgagtttgaggttctgaaggctttcgttgtcgatatgatggaacgtctccgcatttcccaaaaatgggtaagggtcgccgtcgtggaataccacgacggtagccatgcctatattggcctgaaggacaggaagcgccctagcgagctcagaagaatcgctagtcaggtcaagtacgccggttcacaggttgcctctacctctgaggtgttgaagtataccctgttccaaatcttttccaaaatcgaccgtcccgaagcctctcgtatcacactcttgctcatggcctctcaggaacctcagcgtatgagcaggaacttcgtgcgctacgtgcagggcttgaaaaagaagaaggttatcgtgatcccagtgggcattggtccccatgccaatctgaagcagatacgcctcatcgagaaacaggcacccgagaataaggcttttgttcttagctctgttgacgaactggagcagcaaagggacgagatcgtctcctatctctgtgatctcgcacctgaagcacctcctccaactcttccccccgatatggcccaagtcacagtgggacctggactgctgggagtgtcaaccctgggtcccaaacgcaactccatggttctggatgtggcttttgtgctcgagggctctgacaagattggagaggcagacttcaatagatcaaaggaattcatggaggaagtcattcaaagaatggacgtgggtcaggattctattcatgtgacagtgctccaatactcctatatggtcaccgtggagtaccctttctccgaagctcaatccaagggtgacatactccagagagttagagagatccgctaccagggtggcaataggaccaacaccggtttggctctgcgctacctgtccgaccactcatttctcgtgtcccagggagatagagagcaagctcccaatctggtctatatggtgacaggaaaccccgcttctgatgaaattaagagactgccaggcgatatacaggtagtgcctattggcgtaggaccaaacgccaatgttcaggaattggaaagaattggctggcccaacgctccaatcctcattcaggactttgaaacactccctagagaggctcctgaccttgtgcttcagagatgttgctccggagagggactgcagataccaacattgagccctgctcctgattgcagccaacctctggatgttatcctgttgctcgatggctcatcttcatttcctgcttcttattttgatgaaatgaaaagtttcgctaaagcttttatttcaaaagcaaatataggacctcgcctcacacaggtatcagtgttgcaatatggatccatcaccaccatcgacgtgccatggaatgtagtccctgagaaagctcacctgctgtcactggtggacgttatgcagagggaaggaggaccaagccaaatcggtgatgctctgggatttgctgtgcgttaccttacatccgaaatgcatggagccaggcccggcgcctccaaggctgtcgtaattctcgtcacagatgtttccgtggacagtgttgacgctgcagcagatgctgctaggtctaaccgcgtgaccgtattccctattggtataggagatagatatgacgccgctcaactgagaatactcgctggccctgccggcgattcaaacgtcgtcaagttgcagcgcattgaggaccttcccacaatggttaccctcggaaactcattcctgcataaattgtgtagcggatttgtacgcatctgcatggacgaggatggcaatgagaagcgtcctggtgacgtttggacccttcccgatcagtgccatacagtcacctgtcagcccgacggccagacacttttgaagagtcatcgcgttaattgtgaccgtggcctgaggcctagctgccctaactctcaaagcccagtgaaggttgaggagacatgcggttgccgctggacatgcccttgtgtctgcactggatcttctaccagacacattgtgacctttgatggacaaaactttaagcttaccggttcatgctcatacgtcttgttccaaaacaaggagcaagaccttgaagtgatactccataatggagcttgctcccctggtgctagacaaggttgtatgaagtccatcgaagtgaaacattccgccctgtccgtggaattgcactctgatatggaagttactgttaatggcagactggtgtccgtcccttatgtgggtggtaacatggaggtgaatgtctacggagctattatgcatgaggtgagattcaaccacctgggccacatttttactttcacaccacagaacaatgagttccagctccagctgagccctaagaccttcgcctccaagacctatggtttgtgcggtatctgcgatgaaaatggagccaatgactttatgctgcgcgatggtacagtcactaccgactggaagaccctcgtgcaagagtggacagtgcagcgtcccggacagacatgccagcccatactggaagaacagtgcctggtgcccgatagttcccactgtcaagtgctgttgctccctctctttgccgagtgtcacaaagtcctcgctcctgctacattctatgccatctgtcagcaagattcttgccatcaggagcaagtctgcgaggttatcgcctcatatgcacacctttgccgcacaaacggagtttgcgtggactggcgcacccccgacttctgtgctatgtcctgcccacctagcctggtttataaccattgcgaacacggctgccctcgtcactgcgacggtaatgtgtccagctgtggtgatcacccctcagagggttgcttttgcccaccagataaggttatgttggaaggctcttgtgtccctgaggaggcttgcacacagtgcataggcgaggatggtgtacagcatcagttcttggaggcatgggtgcctgaccaccagccttgtcagatttgcacctgcttgtccggcaggaaggtgaactgtactactcagccttgccctaccgctaaggcacccacttgtggcttgtgcgaagtcgcacgtctcagacaaaacgcagatcaatgctgtccagagtacgagtgcgtgtgcgaccctgtttcatgcgatctgccccccgtgccccattgtgagaggggactgcagcctactctgactaaccctggcgagtgccgtccaaactttacctgcgcctgcaggaaggaagagtgcaagcgtgtgtctcccccttcctgtccaccccatcgcttgcctactctgaggaagacccaatgttgcgacgagtatgaatgcgcctgcaactgcgtcaattctaccgtatcttgtcctctcggatacttggcttccactgcaactaatgactgcggctgtaccaccacaacttgtctgcccgacaaggtgtgcgtacatagaagcaccatataccccgtcggccaattctgggaggagggttgcgacgtgtgtacttgcacagatatggaggacgccgtgatgggactgagagtggctcagtgctctcagaagccttgcgaggacagttgccgctctggttttacttacgtgcttcacgaaggcgagtgttgcggcaggtgccttcccagtgcatgcgaagtggtcaccggctcaccccgcggagactctcagtcctcctggaaatccgtgggttcccaatgggccagccccgagaatccctgtctgatcaatgagtgtgtgagagtgaaggaggaggtgttcatccagcagaggaatgtgtcctgcccccagctggaggtgcctgtgtgtccctctggttttcagctctcctgtaaaacttcagcttgctgccctagctgcaggtgtgagcgtatggaagcttgtatgctcaacggtactgtcatcggaccaggaaaaaccgtgatgatcgacgtgtgcaccacttgccgttgtatggtgcaggttggtgtcatttccggctttaagttggagtgtcgcaagaccacatgcaatccctgccccctcggatacaaggaagaaaacaataccggtgagtgttgtggccgctgcctgcccacagcctgtactatacagttgaggggtggccagattatgacacttaagcgcgatgagactcttcaagacggctgcgacacccacttttgtaaagtgaatgagagaggtgaatacttttgggagaaacgcgtaaccggttgccccccattcgacgaacacaagtgtctcgccgaaggcggtaagataatgaaaatccccggtacttgttgcgatacttgcgaggagccagagtgtaatgacatcactgcacgcctccagtatgtcaaggtgggttcttgtaagagtgaggtggaggttgatatccactactgtcagggcaagtgtgccagtaaggctatgtatagcatcgatatcaatgatgtccaggatcagtgctcttgctgctctccaacacgtactgagccaatgcaggtggcactgcactgtaccaacggaagcgtcgtgtatcacgaggtgttgaatgctatggagtgcaaatgctcccctaggaaatgcagcaag

SEQ ID NO: 21422 - DNA, 8439 bp, synthetic construct
  misc_feature 1..8439: note = source = /note="Description of Artificial Sequence: Synthetic coding sequence"
  source 1..8439: mol_type = other DNA
atgatccccgcacgctttgctggagtgctccttgccctggccttgatccttcccggcacactatgcgctgaaggaacaagaggcagaagctctaccgctaggtgcagcctgttcggctccgacttcgtcaatacgtttgacgggagcatgtatagttttgctggatattgcagttacctgctggctggagggtgtcagaagaggagcttcagcattatcggagacttccaaaacggaaagcgcgtgagcctttctgtttacctgggagaattttttgacatccatctgtttgttaacgggaccgtgacccagggggatcagcgggtgagtatgccttacgcaagtaagggtctctatctggaaacagaggcaggttactacaaactttcaggagaagcttatggatttgtcgctcgcatcgacggaagtggcaacttccaggttctcttaagcgaccgctattttaacaagacctgcggcctgtgcggaaactttaatattttcgccgaagatgacttcatgacccaggagggcaccctaacttccgacccctacgattttgcaaacagctgggctctgagctccggggaacagtggtgcgaaagagcctccccacccagctcctcctgcaacatctcatcaggcgaaatgcagaaagggctctgggagcaatgtcaactcttgaaatccacatctgtattcgctaggtgtcacccccttgtcgaccctgaacccttcgtcgctctctgtgaaaaaaccctgtgtgagtgtgccggggggctcgagtgcgcctgccctgcattgcttgaatatgctagaacgtgcgctcaggagggcatggtactgtatggctggaccgatcactcggcatgtagtccagtttgtcctgcagggatggaataccgccagtgtgtttcaccttgcgcacgcacctgccagagcctgcatattaatgaaatgtgtcaagaaagatgtgtcgatggatgctcatgcccagagggccagttacttgacgaggggctgtgcgttgagtctaccgaatgcccatgcgtgcattcgggcaaaagatacccaccaggcacctccttgtcaagagattgcaacacttgcatatgcagaaactcccagtggatctgctcaaacgaggaatgcccaggagagtgcctcgtcacgggccaatcacactttaagtcattcgacaataggtacttcacattcagcggcatctgtcaatacttgctcgcacgcgattgccaagaccactcgtttagtatcgtgatcgaaacagtccaatgcgccgatgatagggacgccgtttgcactaggtctgtgactgtgcgcctaccaggcctccataatagccttgtcaaactcaagcacggcgcaggcgttgcaatggatggacaggatgttcaactgcccctcctcaaaggcgatctgagaattcagcatacagtcacagcgagcgtgcgtctcagctacggagaggacctgcagatggattgggacggccgcggaagactcctggtgaagctgagccctgtttacgcaggtaagacctgcggactttgcggcaactacaacggcaaccagggagacgatttcctgaccccttccggactcgcggagccaagagtagaagatttcggaaacgcctggaaattgcacggcgactgtcaggatttacaaaaacagcacagcgacccatgcgctcttaaccctcgaatgaccagattctccgaggaagcctgcgccgttctgacatcaccaacatttgaagcttgccatcgcgccgtttcaccgctgccatatctgagaaactgcaggtacgatgtctgttcttgctctgatgggagggagtgtctgtgcggcgccctcgccagctatgccgccgcttgcgctggcaggggcgtgcgagtagcctggcgtgaacccggcagatgtgaactgaactgtcctaaaggccaggtctacctccagtgtggtaccccctgcaacctcacatgtaggagcctgagttatcccgatgaagagtgtaacgaggcttgcctcgaaggctgtttctgtccaccaggcctgtacatggacgagcggggcgattgcgtccccaaagctcaatgtccgtgttactatgatggagaaatcttccaaccagaggatatattctccgaccatcatacaatgtgttattgcgaagacggctttatgcactgcactatgtccggagtccccggctccctgctgcccgacgccgttctaagttctccactcagtcatcgctctaagagaagcctgtcttgtaggcctcccatggtcaagctggtgtgtccagctgacaaccttcgggctgaaggcctagagtgcaccaagacctgtcaaaactacgatttggagtgtatgagcatgggatgcgtatctggttgtttatgcccgccgggcatggtaaggcacgagaatcgatgcgtggctctggaaaggtgtccttgctttcaccagggaaaagagtacgcacccggggaaacagtcaagatcggttgcaatacatgcgtatgtcaagatagaaagtggaactgcacagatcacgtgtgcgacgccacatgttctaccattggaatggcccattatctgacgtttgatggcttgaagtacctcttcccaggggaatgccagtatgtgttggtccaggactactgcggctctaaccctggtacttttaggatcctcgttggcaacaagggttgttctcatccatccgttaaatgcaaaaagagagttacaatcctggtcgagggaggagaaatcgagctgtttgacggagaagtgaacgtgaagagaccgatgaaagatgagacacatttcgaagtcgtggagtctgggcgctatattatactgctgctggggaaggcattgagcgtggtctgggacaggcacctctctatctcggtcgtgcttaaacagacataccaggagaaggtctgcggactctgcggtaacttcgatggaattcaaaataatgatctgacctcaagcaacctgcaggtggaagaggatccagtggactttggaaacagctggaaggtttcttcacagtgcgcagatacacggaaggtccctttggattcaagccctgcaacttgccataacaacatcatgaagcagacaatggtggactccagctgtcgaatcctgacctccgatgtctttcaagactgcaacaaactggtcgatcctgagccctacttagatgtttgcatttacgatacttgtagctgtgaatccatcggggattgtgcttgcttctgcgatacgatcgctgcttacgcacatgtgtgcgctcaacatggtaaagtcgtgacctggaggactgcaacactgtgcccccaatcttgcgaagagcgtaacctgagggagaatggttatgaatgcgaatggagatataactcttgcgcaccagcctgccaggtgacctgtcaacacccagagccattagcctgtcccgtgcaatgcgtggagggatgtcacgctcattgccccccaggaaagatcttggacgagctgctgcagacctgcgtggatcccgaggattgtccggtttgtgaggttgctggcaggcggtttgcaagcggcaagaaagtaaccctcaacccatccgatccggagcactgtcagatttgtcattgcgatgtggtcaacctgacttgcgaggcttgtcaagaacccggcggcttggtagtgcctcctacagacgcaccggtgagtccgaccactctctacgtcgaagacattagcgagcctccactccacgatttctattgtagtcggctgctggacttggtgtttttactcgatggaagcagccgtctatctgaggcagaattcgaggtgctcaaggcctttgtcgtcgacatgatggagcgattgaggatctcgcaaaagtgggtgcgagttgccgtcgtggaataccacgacgggtctcatgcctatatcggcctgaaggacagaaaacgaccatccgagctgcggagaatcgcaagccaagtgaagtacgccggttcccaggtagcctcaaccagtgaagtcctgaagtacacccttttccagatcttctcaaaaattgaccgaccagaggcttccaggattaccctgttgctgatggctagccaagaaccccagagaatgagccgtaattttgttcgttatgtacagggcctgaaaaaaaagaaggtaatcgtgatccctgtcggcatcggaccccatgctaatttgaagcagataagactcatagagaaacaggcaccagagaataaggcctttgttctgtcatcagttgatgaactggaacagcaaagagacgagatcgtgtcatacctttgtgacctggcaccagaggcaccaccacctactctgccaccggacatggctcaagtgaccgtgggtcctggtctcctcggcgtgagcactctcgggccaaagaggaactcaatggtccttgatgtcgcctttgtactggaagggagcgacaagattggagaggccgactttaaccgaagcaaggaattcatggaggaagtgattcagagaatggacgtcggacaggattcaattcatgtgaccgtgcttcagtattcttatatggtaacagttgagtatccattttcagaagcccaatctaagggagacatacttcagagagtgcgcgaaatacgttatcagggagggaatcgcacaaataccggcctggcgttgaggtacctgtcagatcattcttttctggtcagccaaggcgaccgcgagcaagctcctaatctcgtgtacatggtaacaggtaacccagctagtgacgagatcaaaagactgcccggagatattcaggtggtcccaatcggcgttggaccaaatgccaacgtgcaggaactggagcgtatcggctggcctaacgcgccgatattgatccaggacttcgagacactgcctagagaagctccagatctggttttgcaacggtgctgcagtggcgaaggactgcagattcctactctgtcacccgcgcccgactgttcacaaccactggacgtcattctgctgcttgatgggtcatcttcttttcctgcatcttatttcgatgaaatgaagtccttcgccaaagcatttattagtaaagccaatattggtcccagattgactcaggtaagcgtgctgcaatatggaagtattacaacaatcgatgtgccatggaatgtcgttccggaaaaggcccacctgctgagtctggtcgacgtgatgcagcgggaaggcggcccgtcccagattggagacgcattgggttttgctgtccgctaccttaccagtgagatgcatggggcccggccaggagcttcgaaagctgtagtcatcctcgtgactgatgtcagcgtagattccgtcgatgctgctgcagatgcagcaaggtctaacagggtgaccgttttcccaatcggaatcggagatcggtatgacgcagctcaacttaggattctggctggacctgctggcgactctaacgtggtgaagctccagaggattgaggacttaccaactatggtaacgctgggcaacagcttccttcacaaactttgctccggttttgtgcgcatttgtatggacgaggatggcaacgaaaagcggcccggagatgtgtggactttgcccgatcaatgtcatactgtgacttgccagcccgatggtcaaacattgctgaaatcccacagagtgaactgtgataggggcctaaggccctcttgccctaacagccaaagtcccgtcaaagtcgaagagacttgcggatgtagatggacctgtccctgcgtgtgtacaggctctagcacaagacatatcgtgaccttcgacggccagaactttaaacttaccggctcctgctcttacgttctgttccagaacaaagagcaggacctggaggtgattctgcataacggggcatgctcccctggagcaaggcagggttgtatgaaatcaattgaagtgaagcacagcgcactgtctgtggaacttcacagtgatatggaagtcaccgtaaatggcaggctggtctctgtgccatacgtcgggggaaacatggaggttaacgtctatggggccataatgcacgaagtgaggtttaaccatctaggacatatcttcacttttactccacagaataatgagttccagctgcaactgtccccaaagaccttcgcgagcaaaacgtacgggctttgcggcatctgcgatgaaaacggcgccaatgacttcatgttacgggatggaacagtaactactgactggaagacgctagttcaggaatggaccgtccagaggcctggacaaacctgccaaccgatactcgaagaacagtgcctcgtaccagatagcagtcactgccaggtgctccttctgcccctgtttgcagagtgccacaaggtgctcgcgcccgccaccttctacgcaatctgccagcaagattcttgccaccaagaacaggtttgcgaagtcatcgcttcatatgcccacctctgcagaaccaatggcgtgtgcgttgattggcggacccccgacttctgtgccatgagttgcccaccaagcctagtgtataaccattgtgagcatggatgtccaaggcactgcgacggcaacgtttcatcctgtggagatcacccctccgaaggatgtttttgtcctcccgataaagtgatgctggaaggctcctgcgtgcctgaagaggcatgcacccagtgcatcggcgaagacggcgtccagcatcagttcctggaggcttgggtcccagaccaccagccatgccagatctgtacctgcctgtcaggaagaaaggtcaactgcacgactcagccatgccccactgccaaggcccccacctgcggtctctgcgaggtggcaagactgcgccaaaatgcagatcaatgctgccctgaatacgagtgcgtctgcgacccggttagctgcgatcttcctcccgtgccccactgcgagagaggactgcagccaacactaaccaatcctggagaatgccgcccaaatttcacttgcgcctgcagaaaggaagaatgtaaacgcgttagtccacctagttgtcctccgcaccgtctgccaaccctgaggaaaacccagtgttgcgacgagtacgagtgcgcttgcaattgtgtgaacagtacagtgagctgcccgctggggtatcttgcttctacggctactaatgattgcggctgcacaactaccacctgcctcccagataaggtttgtgttcacagatccacaatttaccccgtcggacagttttgggaggagggatgtgatgtctgtacatgtacggacatggaagatgctgtcatgggccttcgcgtggctcaatgctcacagaaaccctgcgaagactcttgcaggagcggatttacttatgtcctgcacgagggcgaatgctgcggcaggtgcctcccaagcgcttgtgaggtggtcaccggaagccccagaggggactcacagtcaagctggaaatcagttggcagtcaatgggcttccccggagaatccgtgtctgatcaacgaatgtgtgcgggtgaaagaggaggtgtttatccagcaacgtaatgtaagttgccctcaactggaagtacccgtgtgccccagcggatttcagctgtcgtgtaagacctcagcatgctgtccttcatgtagatgtgagagaatggaggcttgtatgttaaacggaacagtgataggccctggcaagacagtgatgatcgatgtgtgcacaacttgtagatgcatggtccaagtgggcgttattagcggcttcaagctggagtgtcggaagaccacttgcaatccgtgcccattgggatataaggaggagaataacacaggggagtgttgtgggcgctgcctgccaactgcttgtaccatccaactgaggggagggcaaatcatgactctgaaaagagatgagactttgcaggacgggtgtgacacccacttctgtaaagtcaatgagaggggtgagtacttttgggaaaagagagtgacggggtgcccgccctttgacgaacataagtgccttgcggagggcggcaaaatcatgaaaatcccaggaacatgttgcgacacctgtgaagaaccagagtgcaacgatatcacagcaaggctgcaatacgtcaaagttgggagctgtaagtccgaggtcgaggttgacattcattactgccagggaaagtgtgcttctaaagccatgtattccattgacatcaacgatgtgcaagaccaatgttcctgctgtagccccactcggaccgagcctatgcaagtcgcactgcactgcaccaatggatctgtggtataccacgaggtgcttaatgccatggagtgtaaatgcagcccgaggaagtgctctaag

SEQ ID NO: 21423 - DNA, 8439 bp, synthetic construct
  misc_feature 1..8439: note = source = /note="Description of Artificial Sequence: Synthetic coding sequence"
  source 1..8439: mol_type = other DNA
atgattcccgcccgtttcgctggtgttctgctggcactggcacttatcctcccaggtaccctctgtgctgagggtactcgtggccgctcaagcaccgctcgctgctctttgtttggctccgactttgtaaacacattcgatggcagcatgtactcgttcgctgggtactgctcttacctcctcgctggcggatgccaaaagcgctccttctcgatcattggtgactttcaaaacggtaagcgtgtctctctttccgtgtacctgggcgagttctttgatatccacttgttcgtgaacggtacggtcactcagggggatcaacgggtctccatgccttatgcctccaagggtctctatctagagacagaggcgggctactataaactgagtggtgaggcctatggcttcgtcgcgagaatcgacggatccggtaacttccaggtgcttctctccgaccgttactttaataaaacgtgtggtctctgtggaaatttcaacatcttcgcagaagatgatttcatgactcaggagggtaccctgaccagcgacccatacgacttcgctaactcttgggccctctcttccggggagcaatggtgtgagcgagcctcgcccccctccagcagctgtaacatttcgagtggagagatgcaaaaaggactctgggagcagtgccagctgctcaagagcacttctgttttcgctcgatgtcatcctctcgtcgacccggagccattcgtcgcgctctgcgagaagaccctctgcgagtgcgcgggcggcttagaatgcgcctgcccagctctgttggaatacgccaggacctgcgcacaggaaggcatggtcctctatggatggaccgaccattcagcctgcagtcccgtctgccccgccgggatggagtaccgtcagtgcgtctcaccttgcgcccgtacctgccagagcctccatataaatgagatgtgtcaagagcgctgtgtggacgggtgttcctgccctgagggtcagctcttggatgagggtttgtgtgtcgagtccactgaatgcccttgtgtccattctggcaagcgttatccccccggcacctccctgtctcgggattgtaacacctgtatctgccgcaattcgcaatggatctgctccaacgaggagtgtcctggtgagtgtctggtaaccggtcagagccacttcaagtctttcgataaccgttacttcaccttcagcgggatctgtcagtacctcctcgccagagactgtcaggaccattccttttcgatcgttattgaaacggttcaatgtgcggacgaccgtgatgccgtgtgcactcgcagcgtcaccgttcgcctgccaggtttgcataacagtttggttaagctgaagcatggcgctggtgttgccatggatggtcaggatgttcagctccccctcttgaagggcgatctacgcatccagcatacggtcaccgctagcgttcgcctttcctacggcgaggaccttcagatggactgggacggtagaggacgactgttggtcaagctttcccccgtgtacgctggaaagacgtgtggcctctgtggtaactacaacggcaaccagggcgacgacttcctcaccccttcgggactggccgaacccagggtcgaggacttcggaaacgcctggaagcttcacggagactgtcaagatctgcagaagcagcactccgatccctgcgctttgaacccacgcatgacacggttctccgaggaagcttgcgccgttctgacctctcccacgttcgaggcctgccaccgcgccgtgtcaccgttaccctacctacgtaactgtaggtacgatgtctgttcgtgctcggatggtcgtgagtgtctgtgcggtgccctcgccagctacgccgccgcttgtgcaggccggggtgttcgagtcgcctggcgcgaacccgggcgttgcgaacttaactgtcccaagggacaggtgtacttgcagtgcggtaccccttgcaaccttacttgccgtagtctctcgtacccagacgaggagtgcaacgaggcgtgcctggaaggctgtttctgtccccccggtttgtacatggatgagcgcggtgactgcgtgcccaaggcccagtgcccgtgctactacgatggtgaaatcttccagcctgaagacatcttcagcgatcaccatacaatgtgttactgtgaggatggattcatgcattgtaccatgtctggagtgcccggcagcctgcttccggacgcggtgctatctagtccgctgtctcataggtccaaacgtagcctctcttgtcggcccccgatggtcaagctcgtttgcccggcagataatctgcgtgcggaaggcctggagtgcaccaagacttgccagaactacgacctcgaatgcatgtcgatggggtgcgtctctggctgcttatgtcctccaggtatggtgcgtcatgaaaaccgttgcgtcgcgctcgagaggtgcccctgtttccaccagggaaaggagtatgcccccggtgagacggtcaagataggttgcaacacgtgcgtgtgccaggaccgcaagtggaactgcacggaccatgtctgcgatgccacgtgcagcacaatcggaatggcacactatcttacgttcgatggtctcaagtatcttttccccggtgagtgccagtacgtcctagttcaggactattgcggctccaacccggggaccttccggatactcgtcgggaacaagggttgttcgcacccctccgtcaagtgcaagaagagagtgaccattcttgtggaggggggtgagatcgagctgttcgatggtgaggtcaacgtcaagagaccaatgaaggacgaaacccactttgaggtcgttgagtccggcaggtacattatccttctgctggggaaggctctgagtgttgtctgggaccgccacctctcgatatctgtggtcctcaagcagacttaccaagagaaagtgtgcggtctctgcggcaactttgacggcatccaaaataatgacctgaccagttctaacctacaagtggaagaggatccggttgatttcggcaatagttggaaggtgagctcccagtgcgctgatacgcgcaaagtgcccctggattcctccccggcgacctgccacaacaatatcatgaagcaaaccatggttgacagctcctgccgaatcctgacttccgatgtgttccaggattgcaacaaattggttgatccggagccctatctggacgtctgcatctatgacacctgttcgtgtgaatcgattggcgactgcgcatgcttctgtgacaccatagctgcctacgcacacgtctgtgcgcagcacggcaaagttgtgacctggaggaccgcaactctgtgcccgcagtcgtgcgaggagcgaaacttgcgtgagaacgggtacgagtgcgagtggcgctacaattcatgcgcccctgcttgccaggttacctgccaacacccggagcctcttgcctgtccggtccagtgcgtcgagggctgccacgctcactgccctccaggaaagatcctcgacgagctgctgcagacctgcgtcgaccccgaggactgtcccgtctgcgaggtcgcaggccgtcgtttcgcgtctgggaaaaaggtgactctcaatccatctgatcccgagcactgccagatttgccactgcgatgtcgtgaacctaacctgtgaggcgtgccaggagcccggtggactagtggtcccccccaccgacgctcccgtctcgcccactacgctctacgtcgaagacatatcagagcccccccttcacgacttctactgcagtcgtctgcttgatctggtcttcctgcttgatggctcgagccgtctgtcggaggctgagttcgaggtcctcaaggccttcgtcgtcgacatgatggagcgccttcgcatatcgcaaaaatgggtccgcgtggctgtggtcgagtaccacgatggctcgcatgcctacattggcctgaaggaccgcaagagaccgtcggagctacggcgtattgcttcgcaagttaaatatgccgggtcgcaagtcgcctcgacctccgaggtccttaagtacacgctgttccagatcttctccaagatcgaccgacccgaggcctcccgcatcacgctgctgctgatggcctcgcaggagccccagcgcatgtcaaggaacttcgtccggtacgtccagggattgaagaagaaaaaggtgatcgtcatccccgttggaatcggcccacacgcaaacctcaaacagattagactgattgagaaacaagcgccggagaacaaagccttcgttttgtcctccgtggacgagcttgaacaacagcgcgacgagatcgtgagttacctgtgcgacctcgcccctgaggcgccgcccccaacgttgccacccgatatggcccaagtcacggttggtcccggtttactcggcgtttctaccctcggacctaaacggaactccatggtcctcgatgtcgcgttcgttctggagggatctgataaaatcggtgaggcggatttcaatcgctccaaggagttcatggaggaagtcatccagcgtatggatgtcggccaggatagcatccacgtcaccgtcctccaatattcctacatggttaccgtcgagtaccctttctccgaggcccagtccaagggtgatatcttgcagcgggtccgcgaaatccgatatcagggagggaatcgaactaacacgggtctggctctccggtatctgtcggaccactctttcctcgtctctcagggggatcgtgaacaggctcctaacttggtgtatatggtcaccggcaaccccgcctccgacgaaatcaagagactccccggtgacatccaggtcgtgcccatcggcgttggcccaaacgccaacgtgcaggagctcgaacgtattggttggcccaacgccccgatcctcatccaggatttcgagactctgcctagagaggcccccgatctggtcttgcagaggtgctgctccggagagggcctccaaatcccgacgctgagtcctgccccagactgctcacaacctcttgacgtgatccttctcttggatggttccagctcgttccccgcgtcgtatttcgacgagatgaagtcattcgcaaaggccttcatctctaaggcaaatatcggcccccgcctgacacaagtgtcagttctgcaatacggcagcatcaccactattgacgtgccgtggaatgtcgtccccgagaaggcccacctgctttcgctggtggatgtcatgcagcgtgaaggaggaccaagccagataggtgacgctctgggcttcgctgtgcgctacctgacctccgaaatgcatggcgccagaccgggcgcgtcgaaggcggtggtaatccttgtcaccgatgtctcggtcgacagcgtcgacgcggccgccgacgcggctcggtccaatagagtgaccgtcttccccatcggaattggtgaccgttatgacgccgcgcagcttcgaatactagcggggcccgctggtgacagtaacgtcgtcaaactacagcgtatcgaggatctgcccaccatggtcacgttgggtaactcgttccttcacaagctttgcagtggcttcgtgcgcatttgtatggatgaggatggaaacgagaagcggcctggagatgtctggacgcttcctgaccagtgtcataccgtcacttgccaaccggacggacagaccctcctgaagtcgcatcgcgttaattgtgaccgtggcttgcggccttcttgcccaaactcccagtctcccgtgaaggttgaggagacctgcggttgtcgctggacttgcccctgcgtgtgtacgggctcttcgacccgccacattgtaaccttcgatggtcagaacttcaagctcacaggttcttgcagctacgtcctgtttcagaacaaggagcaggaccttgaagtcatccttcacaacggcgcctgctcacccggtgcgcgccagggctgtatgaagtctattgaggttaagcacagtgccttgtcggttgagctgcactccgatatggaggttacggtcaacggtagacttgtctccgtcccgtacgtaggaggtaacatggaggtaaacgtatacggtgcgataatgcatgaggttcgcttcaaccacctgggccatattttcaccttcacaccccagaacaacgagtttcagctgcaactcagccccaagaccttcgcttccaaaacgtacggtttgtgcggcatctgtgacgaaaatggagctaacgatttcatgctccgtgatggcacagtgaccacagactggaagaccctggtccaggagtggactgtccaacgccccgggcagacctgtcagccaattcttgaggagcaatgccttgtgcccgactcgtcccactgccaggtgctcctgctgccccttttcgccgagtgccataaggtcctggcgcctgcaacgttctacgctatttgccagcaggactcttgtcatcaggaacaagtttgtgaggttatcgcatcctacgcccatctgtgccggacgaatggcgtctgtgttgattggcgcacccccgacttctgcgctatgtcctgtcccccatccttggtttataaccactgtgagcacggatgccctcgccactgtgatggcaacgtttcgtcctgtggagatcatcccagcgaagggtgcttctgccctccggataaggtcatgctcgagggttcttgcgtccctgaagaggcctgcacccagtgtatcggtgaggacggcgtccaacaccagttcctggaggcctgggtccccgaccaccagccatgccaaatttgcacctgtcttagcgggcggaaggtgaattgcaccacgcagccttgtccgacggctaaggccccgacctgcgggctctgtgaggtcgccagactcaggcagaacgccgatcagtgttgccccgagtatgagtgtgtttgcgacccggtgtcgtgcgacttgccccccgtcccgcattgcgagcggggcctgcagccgaccctgaccaatcccggggagtgcagaccgaacttcacttgtgcctgtcgtaaggaagaatgcaagcgcgtatcgcctcctagctgtcccccgcacaggctccccaccttgaggaagacccagtgctgcgatgaatacgaatgtgcatgcaactgcgtcaactcgaccgtctcttgcccactcggttacctcgcatccaccgccacgaacgattgtggatgcacgactaccacctgcctgcccgataaggtttgcgtccatcgctcaacgatctacccagtcggtcaattctgggaagaaggctgcgatgtctgtacctgcacagacatggaggacgcggtcatgggtctacgcgtcgcgcaatgtagccaaaagccttgcgaggatagctgccggtccggatttacctacgtgctccacgagggcgagtgctgcggccggtgcttaccttctgcctgcgaggtcgtgaccgggtcgccgcgcggtgattcgcagtcctcgtggaagtctgttggttcccagtgggccagtcccgagaacccttgcttgatcaacgagtgtgttcgtgtgaaggaggaagtctttatccagcagcgcaatgtgtcttgccctcaactcgaggtgcccgtgtgccctagcggcttccagctgtcctgtaagacgagtgcctgttgtccttcctgccgttgcgagcgtatggaggcttgtatgctgaacggtaccgttatcggtccaggtaagacagtcatgattgatgtttgcaccacctgtcgttgcatggttcaagtgggcgttatctccggattcaagcttgagtgtcgcaaaactacctgcaatccgtgccccttgggttataaggaggagaataacaccggagaatgctgcggacgttgtctgccaacggcctgtacgattcagttgcgcggtggtcaaattatgacattgaagcgggacgagactctgcaggatggttgtgacacccacttctgcaaggtcaacgagagaggagagtatttttgggagaagcgcgttaccggttgtcctccattcgatgagcacaagtgcctcgcggaaggcggcaagattatgaagatccctggcacctgttgtgacacctgtgaagagcccgagtgtaacgatatcaccgcccggttgcagtacgttaaagtcggcagctgcaaatctgaggtcgaagtcgacatccactactgtcagggaaagtgcgcttccaaggcgatgtacagcatcgatatcaatgatgttcaggatcaatgttcgtgttgcagccctacccggacggagcccatgcaggttgctctccactgcacgaacggaagcgtagtctaccatgaggttctcaacgctatggagtgcaagtgcagcccgcgcaagtgcagcaag

SEQ ID NO: 21424-21427 - skipped (4 entries)

SEQ ID NO: 21428 - protein, 6 aa, Homo sapiens
LVPRGS

SEQ ID NO: 21429 - protein, 4 aa, Homo sapiens
LVPR

SEQ ID NO: 21430 - protein, 4 aa, Homo sapiens
  VARIANT 1: note = /replace="Phe" or "Gly" or "Ile" or "Leu" or "Thr" or "Val" or "Met"
  VARIANT 2: note = /replace="Phe" or "Gly" or "Ile" or "Leu" or "Thr" or "Val" or "Trp"
  REGION 1..2: note = misc_feature - /note="Residues given in the sequence have no preference with respect to those in the annotations for said positions"
AAPR

SEQ ID NO: 21431 - protein, 4 aa, Homo sapiens
IEGR

SEQ ID NO: 21432 - protein, 4 aa, Homo sapiens
IDGR

SEQ ID NO: 21433 - protein, 4 aa, Homo sapiens
AEGR

SEQ ID NO: 21434 - protein, 4 aa, Homo sapiens
  VARIANT 1: note = /replace="Phe" or "Gly" or "Ile" or "Leu" or "Thr" or "Val" or "Met"
  VARIANT 2: note = /replace="Glu"
  REGION 1..2: note = misc_feature - /note="Residues given in the sequence have no preference with respect to those in the annotations for said positions"
ADGR

SEQ ID NO: 21435 - DNA, 615 bp, synthetic construct
  misc_feature 1..615: note = source = /note="Description of Artificial Sequence: Synthetic transcript sequence"
  source 1..615: mol_type = other DNA
atggctggacctgccacccagagccccatgaagctgatggccctgcagctgctgctgtggcacagtgcactctggacagtgcaggaagccacccccctgggccctgccagctccctgccccagagcttcctgctcaagtgcttagagcaagtgaggaagatccagggcgatggcgcagcgctccaggagaagctgtgtgccacctacaagctgtgccaccccgaggagctggtgctgctcggacactctctgggcatcccctgggctcccctgagcagctgccccagccaggccctgcagctggcaggctgcttgagccaactccatagcggccttttcctctaccaggggctcctgcaggccctggaagggatctcccccgagttgggtcccaccttggacacactgcagctggacgtcgccgactttgccaccaccatctggcagcagatggaagaactgggaatggcccctgccctgcagcccacccagggtgccatgccggccttcgcctctgctttccagcgccgggcaggaggggtcctggttgcctcccatctgcagagcttcctggaggtgtcgtaccgcgttctacgccaccttgcccagccctga

SEQ ID NO: 21436 - DNA, 800 bp, synthetic construct
  misc_feature 1..800: note = source = /note="Description of Artificial Sequence: Synthetic transcript sequence"
  source 1..800: mol_type = other DNA
taatacgactcactatagggaaataagagagaaaagaagagtaagaagaaatataagagccaccatggctggacctgccacccagagccccatgaagctgatggccctgcagctgctgctgtggcacagtgcactctggacagtgcaggaagccacccccctgggccctgccagctccctgccccagagcttcctgctcaagtgcttagagcaagtgaggaagatccagggcgatggcgcagcgctccaggagaagctgtgtgccacctacaagctgtgccaccccgaggagctggtgctgctcggacactctctgggcatcccctgggctcccctgagcagctgccccagccaggccctgcagctggcaggctgcttgagccaactccatagcggccttttcctctaccaggggctcctgcaggccctggaagggatctcccccgagttgggtcccaccttggacacactgcagctggacgtcgccgactttgccaccaccatctggcagcagatggaagaactgggaatggcccctgccctgcagcccacccagggtgccatgccggccttcgcctctgctttccagcgccgggcaggaggggtcctggttgcctcccatctgcagagcttcctggaggtgtcgtaccgcgttctacgccaccttgcccagccctgaagcgctgccttctgcggggcttgccttctggccatgcccttcttctctcccttgcacctgtacctcttggtctttgaataaagcctgagtaggaaggcggccgctcgagcatgcatctaga

SEQ ID NO: 21437 - DNA, 800 bp, synthetic construct
  misc_feature 1..800: note = source = /note="Description of Artificial Sequence: Synthetic transcript sequence"
  source 1..800: mol_type = other DNA
taatacgactcactatagggaaataagagagaaaagaagagtaagaagaaatataagagccaccatggccggtcccgcgacccaaagccccatgaaacttatggccctgcagttgctgctttggcactcggccctctggacagtccaagaagcgactcctctcggacctgcctcatcgttgccgcagtcattccttttgaagtgtctggagcaggtgcgaaagattcagggcgatggagccgcactccaagagaagctctgcgcgacatacaaactttgccatcccgaggagctcgtactgctcgggcacagcttggggattccctgggctcctctctcgtcctgtccgtcgcaggctttgcagttggcagggtgcctttcccagctccactccggtttgttcttgtatcagggactgctgcaagcccttgagggaatctcgccagaattgggcccgacgctggacacgttgcagctcgacgtggcggatttcgcaacaaccatctggcagcagatggaggaactggggatggcacccgcgctgcagcccacgcagggggcaatgccggcctttgcgtccgcgtttcagcgcagggcgggtggagtcctcgtagcgagccaccttcaatcatttttggaagtctcgtaccgggtgctgagacatcttgcgcagccgtgaagcgctgccttctgcggggcttgccttctggccatgcccttcttctctcccttgcacctgtacctcttggtctttgaataaagcctgagtaggaaggcggccgctcgagcatgcatctaga

SEQ ID NO: 21438 - RNA, 758 nt, synthetic construct; identical to SEQ ID NO: 1628
  misc_feature 1..758: note = source = /note="Description of Artificial Sequence: Synthetic transcript sequence"
  source 1..758: mol_type = other RNA

SEQ ID NO: 21439 - RNA, 854 nt, synthetic construct
  misc_feature 1..854: note = source = /note="Description of Artificial Sequence: Synthetic transcript sequence"
  source 1..854: mol_type = other RNA
gggaaataagagagaaaagaagagtaagaagaaatataagagccaccatggtatccaagggggaggaggacaacatggcgatcatcaaggagttcatgcgattcaaggtgcacatggaaggttcggtcaacggacacgaatttgaaatcgaaggagagggtgaaggaaggccctatgaagggacacagaccgcgaaactcaaggtcacgaaagggggaccacttcctttcgcctgggacattctttcgccccagtttatgtacgggtccaaagcatatgtgaagcatcccgccgatattcctgactatctgaaactcagctttcccgagggattcaagtgggagcgggtcatgaactttgaggacgggggtgtagtcaccgtaacccaagactcaagcctccaagacggcgagttcatctacaaggtcaaactgcgggggactaactttccgtcggatgggccggtgatgcagaagaaaacgatgggatgggaagcgtcatcggagaggatgtacccagaagatggtgcattgaagggggagatcaagcagagactgaagttgaaagatgggggacattatgatgccgaggtgaaaacgacatacaaagcgaaaaagccggtgcagcttcccggagcgtataatgtgaatatcaagttggatattacttcacacaatgaggactacacaattgtcgaacagtacgaacgcgctgagggtagacactcgacgggaggcatggacgagttgtacaaatgataagctgccttctgcggggcttgccttctggccatgcccttcttctctcccttgcacctgtacctcttggtctttgaataaagcctgagtaggaag

SEQ ID NO: 21440 - DNA, 896 bp, synthetic construct
  misc_feature 1..896: note = source = /note="Description of Artificial Sequence: Synthetic transcript sequence"
  source 1..896: mol_type = other DNA
taatacgactcactatagggaaataagagagaaaagaagagtaagaagaaatataagagccaccatggtatccaagggggaggaggacaacatggcgatcatcaaggagttcatgcgattcaaggtgcacatggaaggttcggtcaacggacacgaatttgaaatcgaaggagagggtgaaggaaggccctatgaagggacacagaccgcgaaactcaaggtcacgaaagggggaccacttcctttcgcctgggacattctttcgccccagtttatgtacgggtccaaagcatatgtgaagcatcccgccgatattcctgactatctgaaactcagctttcccgagggattcaagtgggagcgggtcatgaactttgaggacgggggtgtagtcaccgtaacccaagactcaagcctccaagacggcgagttcatctacaaggtcaaactgcgggggactaactttccgtcggatgggccggtgatgcagaagaaaacgatgggatgggaagcgtcatcggagaggatgtacccagaagatggtgcattgaagggggagatcaagcagagactgaagttgaaagatgggggacattatgatgccgaggtgaaaacgacatacaaagcgaaaaagccggtgcagcttcccggagcgtataatgtgaatatcaagttggatattacttcacacaatgaggactacacaattgtcgaacagtacgaacgcgctgagggtagacactcgacgggaggcatggacgagttgtacaaatgataagctgccttctgcggggcttgccttctggccatgcccttcttctctcccttgcacctgtacctcttggtctttgaataaagcctgagtaggaaggcggccgctcgagcatgcatctaga

SEQ ID NO: 21441 - DNA, 767 bp, synthetic construct
  misc_feature 1..767: note = source = /note="Description of Artificial Sequence: Synthetic transcript sequence"
  source 1..767: mol_type = other DNA
taatacgactcactatagggaaataagagagaaaagaagagtaagaagaaatataagagccaccatgggagtgcacgagtgtcccgcgtggttgtggttgctgctgtcgctcttgagcctcccactgggactgcctgtgctgggggcaccacccagattgatctgcgactcacgggtacttgagaggtaccttcttgaagccaaagaagccgaaaacatcacaaccggatgcgccgagcactgctccctcaatgagaacattactgtaccggatacaaaggtcaatttctatgcatggaagagaatggaagtaggacagcaggccgtcgaagtgtggcaggggctcgcgcttttgtcggaggcggtgttgcggggtcaggccctcctcgtcaactcatcacagccgtgggagcccctccaacttcatgtcgataaagcggtgtcggggctccgcagcttgacgacgttgcttcgggctctgggcgcacaaaaggaggctatttcgccgcctgacgcggcctccgcggcacccctccgaacgatcaccgcggacacgtttaggaagctttttagagtgtacagcaatttcctccgcggaaagctgaaattgtatactggtgaagcgtgtaggacaggggatcgctgataagctgccttctgcggggcttgccttctggccatgcccttcttctctcccttgcacctgtacctcttggtctttgaataaagcctgagtaggaaggcggccgctcgagcatgcatctaga

SEQ ID NO: 21442 - DNA, 750 bp, synthetic construct
  misc_feature 1..750: note = source = /note="Description of Artificial Sequence: Synthetic transcript sequence"
  source 1..750: mol_type = other DNA
taatacgactcactatagggaaataagagagaaaagaagagtaagaagaaatataagagccaccatgggagtgcacgagtgtcccgcgtggttgtggttgctgctgtcgctcttgagcctcccactgggactgcctgtgctgggggcaccacccagattgatctgcgactcacgggtacttgagaggtaccttcttgaagccaaagaagccgaaaacatcacaaccggatgcgccgagcactgctccctcaatgagaacattactgtaccggatacaaaggtcaatttctatgcatggaagagaatggaagtaggacagcaggccgtcgaagtgtggcaggggctcgcgcttttgtcggaggcggtgttgcggggtcaggccctcctcgtcaactcatcacagccgtgggagcccctccaacttcatgtcgataaagcggtgtcggggctccgcagcttgacgacgttgcttcgggctctgggcgcacaaaaggaggctatttcgccgcctgacgcggcctccgcggcacccctccgaacgatcaccgcggacacgtttaggaagctttttagagtgtacagcaatttcctccgcggaaagctgaaattgtatactggtgaagcgtgtaggacaggggatcgctgataagctgccttctgcggggcttgccttctggccatgcccttcttctctcccttgcacctgtacctcttggtctttgaataaagcctgagtaggaaggcggccgc

SEQ ID NO: 21443 - DNA, 1578 bp, synthetic construct
  misc_feature 1..1578: note = source = /note="Description of Artificial Sequence: Synthetic transcript sequence"
  source 1..1578: mol_type = other DNA
taatacgactcactatagggaaataagagagaaaagaagagtaagaagaaatataagagccaccaatgcagcgcgtcaacatgattatggccgaatcgccgggactcatcacaatctgcctcttgggttatctcttgtcggcagaatgtaccgtgttcttggatcacgaaaacgcgaacaaaattcttaatcgcccgaagcggtataactccgggaaacttgaggagtttgtgcagggcaatcttgaacgagagtgcatggaggagaaatgctcctttgaggaggcgagggaagtgtttgaaaacacagagcgaacaacggagttttggaagcaatacgtagatggggaccagtgtgagtcgaatccgtgcctcaatgggggatcatgtaaagatgacatcaatagctatgaatgctggtgcccgtttgggtttgaagggaagaactgtgagctggatgtgacgtgcaacatcaaaaacggacgctgtgagcagttttgtaagaactcggctgacaataaggtagtatgctcgtgcacagagggataccggctggcggagaaccaaaaatcgtgcgagcccgcagtcccgttcccttgtgggagggtgagcgtgtcacagactagcaagttgacgagagcggagactgtattccccgacgtggactacgtcaacagcaccgaagccgaaacaatcctcgataacatcacgcagagcactcagtccttcaatgactttacgagggtcgtaggtggtgaggacgcgaaacccggtcagttcccctggcaggtggtattgaacggaaaagtcgatgccttttgtggaggttccattgtcaacgagaagtggattgtcacagcggcacactgcgtagaaacaggagtgaaaatcacggtagtggcgggagagcataacattgaagagacagagcacacggaacaaaagcgaaatgtcatcagaatcattccacaccataactataacgcggcaatcaataagtacaatcacgacatcgcacttttggagcttgacgaacctttggtgcttaattcgtacgtcacccctatttgtattgccgacaaagagtatacaaacatcttcttgaaattcggctccgggtacgtatcgggctggggcagagtgttccataagggtagatccgcactggtgttgcaatacctcagggtgcccctcgtggatcgagccacttgtctgcggtccaccaaattcacaatctacaacaatatgttctgtgcgggattccatgaaggtgggagagatagctgccagggagactcagggggtccccacgtgacggaagtcgaggggacgtcatttctgacgggaattatctcatggggagaggaatgtgcgatgaaggggaaatatggcatctacactaaagtgtcacggtatgtcaattggatcaaggaaaagacgaaactcacgtgatcagccagcgctgccttctgcggggcttgccttctggccatgcccttcttctctcccttgcacctgtacctcttggtctttgaataaagcctgagtaggaaggcggccgctcgagcatgcatctaga

SEQ ID NO: 21444 - RNA, 851 nt, synthetic construct
  misc_feature 1..851: note = source = /note="Description of Artificial Sequence: Synthetic transcript sequence"
  source 1..851: mol_type = other RNA
gggaaataagagagaaaagaagagtaagaagaaatataagagccaccatggtgagcaagggcgaggaggataacatggccatcatcaaggagttcatgcgcttcaaggtgcacatggagggctccgtgaacggccacgagttcgagatcgagggcgagggcgagggccgcccctacgagggcacccagaccgccaagctgaaggtgaccaagggtggccccctgcccttcgcctgggacatcctgtcccctcagttcatgtacggctccaaggcctacgtgaagcaccccgccgacatccccgactacttgaagctgtccttccccgagggcttcaagtgggagcgcgtgatgaacttcgaggacggcggcgtggtgaccgtgacccaggactcctccctgcaggacggcgagttcatctacaaggtgaagctgcgcggcaccaacttcccctccgacggccccgtaatgcagaagaagaccatgggctgggaggcctcctccgagcggatgtaccccgaggacggcgccctgaagggcgagatcaagcagaggctgaagctgaaggacggcggccactacgacgctgaggtcaagaccacctacaaggccaagaagcccgtgcagctgcccggcgcctacaacgtcaacatcaagttggacatcacctcccacaacgaggactacaccatcgtggaacagtacgaacgcgccgagggccgccactccaccggcggcatggacgagctgtacaagtgagctgccttctgcggggcttgccttctggccatgcccttcttctctcccttgcacctgtacctcttggtctttgaataaagcctgagtaggaag

SEQ ID NO: 21445 - DNA, 1838 bp, synthetic construct
  misc_feature 1..1838: note = source = /note="Description of Artificial Sequence: Synthetic transcript sequence"
  source 1..1838: mol_type = other DNA
taatacgactcactatagggaaataagagagaaaagaagagtaagaagaaatataagagccaccatggaagatgcgaagaacatcaagaagggacctgccccgttttaccctttggaggacggtacagcaggagaacagctccacaaggcgatgaaacgctacgccctggtccccggaacgattgcgtttaccgatgcacatattgaggtagacatcacatacgcagaatacttcgaaatgtcggtgaggctggcggaagcgatgaagagatatggtcttaacactaatcaccgcatcgtggtgtgttcggagaactcattgcagtttttcatgccggtccttggagcacttttcatcggggtcgcagtcgcgccagcgaacgacatctacaatgagcgggaactcttgaatagcatgggaatctcccagccgacggtcgtgtttgtctccaaaaaggggctgcagaaaatcctcaacgtgcagaagaagctccccattattcaaaagatcatcattatggatagcaagacagattaccaagggttccagtcgatgtatacctttgtgacatcgcatttgccgccagggtttaacgagtatgacttcgtccccgagtcatttgacagagataaaaccatcgcgctgattatgaattcctcgggtagcaccggtttgccaaagggggtggcgttgccccaccgcactgcttgtgtgcggttctcgcacgctagggatcctatctttggtaatcagatcattcccgacacagcaatcctgtccgtggtaccttttcatcacggttttggcatgttcacgactctcggctatttgatttgcggtttcagggtcgtacttatgtatcggttcgaggaagaactgtttttgagatccttgcaagattacaagatccagtcggccctccttgtgccaacgcttttctcattctttgcgaaatcgacacttattgataagtatgacctttccaatctgcatgagattgcctcagggggagcgccgcttagcaaggaagtcggggaggcagtggccaagcgcttccaccttcccggaattcggcagggatacgggctcacggagacaacatccgcgatccttatcacgcccgagggtgacgataagccgggagccgtcggaaaagtggtccccttctttgaagccaaggtcgtagacctcgacacgggaaaaaccctcggagtgaaccagaggggcgagctctgcgtgagagggccgatgatcatgtcaggttacgtgaataaccctgaagcgacgaatgcgctgatcgacaaggatgggtggttgcattcgggagacattgcctattgggatgaggatgagcacttctttatcgtagatcgacttaagagcttgatcaaatacaaaggctatcaggtagcgcctgccgagctcgagtcaatcctgctccagcaccccaacattttcgacgccggagtggccgggttgcccgatgacgacgcgggtgagctgccagcggccgtggtagtcctcgaacatgggaaaacaatgaccgaaaaggagatcgtggactacgtagcatcacaagtgacgactgcgaagaaactgaggggaggggtagtctttgtggacgaggtcccgaaaggcttgactgggaagcttgacgctcgcaaaatccgggaaatcctgattaaggcaaagaaaggcgggaaaatcgctgtctgataagctgccttctgcggggcttgccttctggccatgcccttcttctctcccttgcacctgtacctcttggtctttgaataaagcctgagtaggaaggcggccgctcgagcatgcatctaga

SEQ ID NO: 21446 - RNA, 1796 nt, synthetic construct
  misc_feature 1..1796: note = source = /note="Description of Artificial Sequence: Synthetic transcript sequence"
  source 1..1796: mol_type = other RNA
gggaaataagagagaaaagaagagtaagaagaaatataagagccaccatggaagatgcgaagaacatcaagaagggacctgccccgttttaccctttggaggacggtacagcaggagaacagctccacaaggcgatgaaacgctacgccctggtccccggaacgattgcgtttaccgatgcacatattgaggtagacatcacatacgcagaatacttcgaaatgtcggtgaggctggcggaagcgatgaagagatatggtcttaacactaatcaccgcatcgtggtgtgttcggagaactcattgcagtttttcatgccggtccttggagcacttttcatcggggtcgcagtcgcgccagcgaacgacatctacaatgagcgggaactcttgaatagcatgggaatctcccagccgacggtcgtgtttgtctccaaaaaggggctgcagaaaatcctcaacgtgcagaagaagctccccattattcaaaagatcatcattatggatagcaagacagattaccaagggttccagtcgatgtatacctttgtgacatcgcatttgccgccagggtttaacgagtatgacttcgtccccgagtcatttgacagagataaaaccatcgcgctgattatgaattcctcgggtagcaccggtttgccaaagggggtggcgttgccccaccgcactgcttgtgtgcggttctcgcacgctagggatcctatctttggtaatcagatcattcccgacacagcaatcctgtccgtggtaccttttcatcacggttttggcatgttcacgactctcggctatttgatttgcggtttcagggtcgtacttatgtatcggttcgaggaagaactgtttttgagatccttgcaagattacaagatccagtcggccctccttgtgccaacgcttttctcattctttgcgaaatcgacacttattgataagtatgacctttccaatctgcatgagattgcctcagggggagcgccgcttagcaaggaagtcggggaggcagtggccaagcgcttccaccttcccggaattcggcagggatacgggctcacggagacaacatccgcgatccttatcacgcccgagggtgacgataagccgggagccgtcggaaaagtggtccccttctttgaagccaaggtcgtagacctcgacacgggaaaaaccctcggagtgaaccagaggggcgagctctgcgtgagagggccgatgatcatgtcaggttacgtgaataaccctgaagcgacgaatgcgctgatcgacaaggatgggtggttgcattcgggagacattgcctattgggatgaggatgagcacttctttatcgtagatcgacttaagagcttgatcaaatacaaaggctatcaggtagcgcctgccgagctcgagtcaatcctgctccagcaccccaacattttcgacgccggagtggccgggttgcccgatgacgacgcgggtgagctgccagcggccgtggtagtcctcgaacatgggaaaacaatgaccgaaaaggagatcgtggactacgtagcatcacaagtgacgactgcgaagaaactgaggggaggggtagtctttgtggacgaggtcccgaaaggcttgactgggaagcttgacgctcgcaaaatccgggaaatcctgattaaggcaaagaaaggcgggaaaatcgctgtctgataagctgccttctgcggggcttgccttctggccatgcccttcttctctcccttgcacctgtacctcttggtctttgaataaagcctgagtaggaag

SEQ ID NO: 21447 - DNA, 905 bp, synthetic construct
  misc_feature 1..905: note = source = /note="Description of Artificial Sequence: Synthetic transcript sequence"
  source 1..905: mol_type = other DNA
taatacgactcactatagggaaataagagagaaaagaagagtaagaagaaatataagagccaccatggtgtccaagggtgaggaattgtttaccggggtggtgcctattctcgtcgaacttgacggggatgtgaatggacacaagttttcggtatccggagaaggagagggtgacgccacatacggaaagcttacactcaaattcatctgtacgacggggaaactgcccgtaccctggcctacgctcgtaaccacgctgacttatggagtgcagtgctttagcagataccccgaccatatgaagcagcacgacttcttcaagtcggcgatgcccgaggggtacgtgcaagagaggaccattttcttcaaagacgatggcaattacaaaacacgcgcagaagtcaagtttgagggcgatactctggtcaatcggatcgaattgaagggaatcgatttcaaagaagatggaaacatccttggccataagctcgagtacaactataactcgcataatgtctatatcatggctgacaagcagaaaaacggtatcaaagtcaactttaagatccgacacaatattgaggacggttcggtgcagcttgcggaccactatcaacagaatacgccgattggggatggtccggtccttttgccggataaccattatctctcaacccagtcagccctgagcaaagatccaaacgagaagagggaccacatggtcttgctcgaattcgtgacagcggcagggatcactctgggaatggacgagttgtacaagtgataagctgccttctgcggggcttgccttctggccatgcccttcttctctcccttgcacctgtacctcttggtctttgaataaagcctgagtaggaaggcggccgctcgagcatgcatctaga

SEQ ID NO: 21448 - RNA, 863 nt, synthetic construct
  misc_feature 1..863: note = source = /note="Description of Artificial Sequence: Synthetic transcript sequence"
  source 1..863: mol_type = other RNA
gggaaataagagagaaaagaagagtaagaagaaatataagagccaccatggtgtccaagggtgaggaattgtttaccggggtggtgcctattctcgtcgaacttgacggggatgtgaatggacacaagttttcggtatccggagaaggagagggtgacgccacatacggaaagcttacactcaaattcatctgtacgacggggaaactgcccgtaccctggcctacgctcgtaaccacgctgacttatggagtgcagtgctttagcagataccccgaccatatgaagcagcacgacttcttcaagtcggcgatgcccgaggggtacgtgcaagagaggaccattttcttcaaagacgatggcaattacaaaacacgcgcagaagtcaagtttgagggcgatactctggtcaatcggatcgaattgaagggaatcgatttcaaagaagatggaaacatccttggccataagctcgagtacaactataactcgcataatgtctatatcatggctgacaagcagaaaaacggtatcaaagtcaactttaagatccgacacaatattgaggacggttcggtgcagcttgcggaccactatcaacagaatacgccgattggggatggtccggtccttttgccggataaccattatctctcaacccagtcagccctgagcaaagatccaaacgagaagagggaccacatggtcttgctcgaattcgtgacagcggcagggatcactctgggaatggacgagttgtacaagtgataagctgccttctgcggggcttgccttctggccatgcccttcttctctcccttgcacctgtacctcttggtctttgaataaagcctgagtaggaag

SEQ ID NO: 21449 - RNA, 806 nt, synthetic construct
  misc_feature 1..806: note = source = /note="Description of Artificial Sequence: Synthetic transcript sequence"
  source 1..806: mol_type = other RNA
gggaaataagagagaaaagaagagtaagaagaaatataagagccaccatgggtgtaaggcacccgccctgctcccacagactcctggcggtgtgtgccttggtatcgcttgcgaccgccgcactgcttgtcaatccgggggtagtcgtgcgcatcagccagaagggactggattacgcctcgcagcagggtaccgcggcacttcagaaagagcttaagcggatcaagattccagactattcagatagctttaagatcaagcatttgggaaaaggtcactattcgttttactcgatggacattagagaattccagctcccttcgtcccaaatttccatggtcccgaatgtggggctgaaattcagcatttcgaacgcgaacatcaagatctcagggaaatggaaggcacagaagcgatttctcaaaatgtcaggaaactttgatctctccatcgaggggatgtcaatctcggcggacttgaaactcggctccaatcctacatcgggaaagcccactattacggcctcgtcgtgttcgagccatatcaactcggtgcacgtccatatctcaaagtccaaagtaggatggcttatccagctcttccacaaaaagattgagtcggctttgcgcaacaagatgaatagccaagtgtgcgagaaagtcacaaattccgtgtcatcagaattgcagccctacttccaaacgctgtaatgagctgccttctgcggggcttgccttctggccatgcccttcttctctcccttgcacctgtacctcttggtctttgaataaagcctgagtaggaag

SEQ ID NO: 21450 - RNA, 1573 nt, synthetic construct
  misc_feature 1..1573: note = source = /note="Description of Artificial Sequence: Synthetic transcript sequence"
  source 1..1573: mol_type = other RNA
gggaaataagagagaaaagaagagtaagaagaaatataagagccaccatggtatccaagggggaggaggacaacatggcgatcatcaaggagttcatgcgattcaaggtgcacatggaaggttcggtcaacggacacgaatttgaaatcgaaggagagggtgaaggaaggccctatgaagggacacagaccgcgaaactcaaggtcacgaaagggggaccacttcctttcgcctgggacattctttcgccccagtttatgtacgggtccaaagcatatgtgaagcatcccgccgatattcctgactatctgaaactcagctttcccgagggattcaagtgggagcgggtcatgaactttgaggacgggggtgtagtcaccgtaacccaagactcaagcctccaagacggcgagttcatctacaaggtcaaactgcgggggactaactttccgtcggatgggccggtgatgcagaagaaaacgatgggatgggaagcgtcatcggagaggatgtacccagaagatggtgcattgaagggggagatcaagcagagactgaagttgaaagatgggggacattatgatgccgaggtgaaaacgacatacaaagcgaaaaagccggtgcagcttcccggagcgtataatgtgaatatcaagttggatattacttcacacaatgaggactacacaattgtcgaacagtacgaacgcgctgagggtagacactcgacgggaggcatggacgagttgtacaaaggaagcggagctactaacttcagcctgctgaagcaggctggagacgtggaggagaaccctggacctatggtgtccaagggtgaggaattgtttaccggggtggtgcctattctcgtcgaacttgacggggatgtgaatggacacaagttttcggtatccggagaaggagagggtgacgccacatacggaaagcttacactcaaattcatctgtacgacggggaaactgcccgtaccctggcctacgctcgtaaccacgctgacttatggagtgcagtgctttagcagataccccgaccatatgaagcagcacgacttcttcaagtcggcgatgcccgaggggtacgtgcaagagaggaccattttcttcaaagacgatggcaattacaaaacacgcgcagaagtcaagtttgagggcgatactctggtcaatcggatcgaattgaagggaatcgatttcaaagaagatggaaacatccttggccataagctcgagtacaactataactcgcataatgtctatatcatggctgacaagcagaaaaacggtatcaaagtcaactttaagatccgacacaatattgaggacggttcggtgcagcttgcggaccactatcaacagaatacgccgattggggatggtccggtccttttgccggataaccattatctctcaacccagtcagccctgagcaaagatccaaacgagaagagggaccacatggtcttgctcgaattcgtgacagcggcagggatcactctgggaatggacgagttgtacaagtgataatggtctttgaataaagcctgagtaggaag

SEQ ID NO: 21451 - RNA, 1568 nt, synthetic construct
  misc_feature 1..1568: note = source = /note="Description of Artificial Sequence: Synthetic transcript sequence"
  source 1..1568: mol_type = other RNA
gggaaataagagagaaaagaagagtaagaagaaatataagagccaccatggccgtgatggcgccgcggaccctggtcctcctgctgtcgggcgccctcgccctgacgcagacctgggccgaggtgcagctggtcgagagcggcgggggcctcgtgcagccgggcgggtcgctgcggctgagctgcgccgcgagcgggttcaacatcaaggacacctacatccactgggtgcgccaggcccccggcaagggcctcgagtgggtcgcccggatctaccccacgaacgggtacacccgctacgccgacagcgtgaagggccggttcaccatcagcgcggacacctcgaagaacacggcctacctgcagatgaacagcctgcgcgccgaggacaccgccgtgtactactgcagccggtggggcggcgacgggttctacgccatggactactgggggcagggcaccctcgtcaccgtgagcagcgcgtcgacgaaggggcccagcgtgttcccgctggcccccagcagcaagagcaccagcggcgggaccgccgccctgggctgcctcgtcaaggactacttccccgagcccgtgaccgtgtcgtggaacagcggcgcgctgacgagcggggtccacaccttcccggccgtgctgcagagcagcggcctctactcgctgagcagcgtggtcaccgtgcccagcagcagcctggggacccagacgtacatctgcaacgtgaaccacaagccctcgaacaccaaggtcgacaagaaggtggagcccaagagctgcgacaagacccacacctgcccgccctgccccgcccccgagctcctgggcgggcccagcgtgttcctgttcccgcccaagcccaaggacacgctcatgatcagccgcacccccgaggtcacctgcgtggtggtcgacgtgagccacgaggaccccgaggtgaagttcaactggtacgtcgacggcgtggaggtgcacaacgccaagaccaagccgcgggaggagcagtacaactcgacgtaccgcgtcgtgagcgtgctgaccgtcctgcaccaggactggctcaacggcaaggagtacaagtgcaaggtgagcaacaaggccctgcccgcgcccatcgagaagaccatcagcaaggccaaggggcagccccgggagccgcaggtgtacaccctgccccccagccgcgacgagctcacgaagaaccaggtcagcctgacctgcctggtgaagggcttctacccctcggacatcgccgtggagtgggagagcaacgggcagccggagaacaactacaagaccaccccgcccgtcctcgacagcgacggcagcttcttcctgtacagcaagctgacggtggacaagtcgcggtggcagcagggcaacgtgttcagctgcagcgtcatgcacgaggccctccacaaccactacacccagaagagcctgagcctgagccccgggtgataataggctgccttctgcggggcttgccttctggccatgcccttcttctctcccttgcacctgtacctcttggtctttgaataaagcctgagtaggaag

SEQ ID NO: 21452 - RNA, 863 nt, synthetic construct
  misc_feature 1..863: note = source = /note="Description of Artificial Sequence: Synthetic transcript sequence"
  source 1..863: mol_type = other RNA
gggaaataagagagaaaagaagagtaagaagaaatataagagccaccatggccgtgatggcgccgcggaccctggtcctcctgctgtcgggcgccctcgccctgacgcagacctgggccgacatccagatgacccagagcccgtcgagcctgagcgccagcgtgggcgaccgggtcacgatcacctgccgcgcgagccaggacgtgaacaccgccgtggcctggtaccagcagaagcccgggaaggcccccaagctcctgatctactcggcgagcttcctgtacagcggcgtccccagccggttcagcgggtcgcgcagcggcaccgacttcacgctcaccatcagcagcctgcagccggaggacttcgccacctactactgccagcagcactacaccacgccccccaccttcgggcagggcaccaaggtggagatcaagcggaccgtggccgcccccagcgtcttcatcttcccgcccagcgacgagcagctgaagtcgggcacggccagcgtggtgtgcctcctgaacaacttctacccccgcgaggcgaaggtccagtggaaggtggacaacgccctgcagagcgggaacagccaggagagcgtgaccgagcaggactcgaaggacagcacctacagcctcagcagcaccctgacgctgagcaaggccgactacgagaagcacaaggtctacgcctgcgaggtgacccaccaggggctctcgagccccgtgaccaagagcttcaaccggggcgagtgctgataataggctgccttctgcggggcttgccttctggccatgcccttcttctctcccttgcacctgtacctcttggtctttgaataaagcctgagtaggaag

SEQ ID NO: 21453 - RNA, 947 nt, synthetic construct; identical to SEQ ID NO: 1616
  misc_feature 1..947: note = source = /note="Description of Artificial Sequence: Synthetic transcript sequence"
  source 1..947: mol_type = other RNA

SEQ ID NO: 21454 - RNA, 947 nt, synthetic construct; identical to SEQ ID NO: 1615
  misc_feature 1..947: note = source = /note="Description of Artificial Sequence: Synthetic transcript sequence"
  source 1..947: mol_type = other RNA

SEQ ID NO: 21455 - RNA, 947 nt, synthetic construct; identical to SEQ ID NO: 1614
  misc_feature 1..947: note = source = /note="Description of Artificial Sequence: Synthetic transcript sequence"
  source 1..947: mol_type = other RNA

SEQ ID NO: 21456 - RNA, 2745 nt, synthetic construct
  misc_feature 1..2745: note = source = /note="Description of Artificial Sequence: Synthetic transcript sequence"
  source 1..2745: mol_type = other RNA
gggaaataagagagaaaagaagagtaagaagaaatataagagccaccatgttttcgatgagaattgtgtgtctcgtcttgtcagtcgtaggaaccgcgtggaccgccgacagcggggaaggtgatttcttggctgagggtggtggagtccgcggtcccagagtggtagaaaggcatcaatccgcatgtaaagacagcgattggccgttctgctcggatgaggactggaactataagtgcccttccgggtgtcggatgaaggggctcatcgacgaggtcaatcaggatttcactaaccgcatcaataagctcaaaaactcgctgttcgagtaccagaagaacaacaaggatagccactcgctgactacaaatatcatggaaatcttgcggggagacttctcaagcgcgaataatcgcgataatacgtacaaccgagtatcagaggacttgaggtcgaggattgaagtccttaagcggaaggtcattgagaaagtccaacacatccagttgctgcagaagaacgtacgggcgcagttggtggatatgaagaggctggaagtggacatcgacatcaagatccgatcctgtcggggatcatgctcacgagccttggcgagggaggtagacttgaaggactatgaggaccagcagaagcagttggaacaggtgattgccaaggacttgcttccgtcacgggatcggcagcacctccctttgatcaagatgaaacccgtgccggacctcgtgcccggaaacttcaagtcccagcttcagaaggtaccaccggagtggaaagcgcttacagacatgccgcagatgcggatggagttggagaggccgggaggaaacgaaattacgagaggcggctcaacatcgtacgggacaggttcggaaacagaatcgcccagaaatccatcgtcagcaggatcatggaacagcggtagctccggaccgggttcgacgggaaatagaaacccgggatcatcaggtaccggtgggactgcgacttggaagcccggttcgtcgggaccgggatcgactggatcgtggaatagcggctcctccggtactggatcgaccggaaatcagaatcctggttcgcctcggcctggctccaccggaacatggaacccgggcagcagcgaaaggggatcggctggacactggacgtcagagtcgtccgtgtcagggtcgacggggcagtggcactccgaatcgggatcgttccggcctgattcacctggctccggaaacgcaagacccaataacccggattggggtacgtttgaagaggtcagcggaaacgtatcaccggggacacggagggagtatcatactgagaaattggtgacatcgaagggagataaagagctcagaacggggaaggagaaggtgacgagcggatcaacgacgactactaggaggtcctgctcgaaaactgtaaccaagaccgtgattgggcccgacggccataaagaggtcactaaagaagtcgtgacctccgaggatgggtccgactgccccgaagccatggacctcgggacgctttccggaattgggacgttggacgggtttagacacaggcaccccgacgaagcagcgtttttcgatacggccagcaccggcaaaacgttccccgggttcttctcgcccatgctcggagagtttgtctcagaaacggagtcgcgcggttcggagagcggtatctttacaaatacgaaagagtcgtcgtcgcaccatcccggaattgcagaatttcccagcaggggcaaaagcagctcatactccaaacagttcacatcgtccacctcgtacaatagaggtgacagcacattcgaaagcaagagctacaaaatggccgacgaggcgggtagcgaggctgatcatgaaggtacacattcaacaaaacgcggacacgctaagtcgcgaccggtgcgggattgcgacgatgtcctccagacccacccctcggggacacaatcgggtattttcaatatcaaacttcccgggtcctcgaagatcttttcggtatattgtgatcaagaaacgtccttgggagggtggctccttatccaacaacgcatggacgggtcactgaactttaatcgaacgtggcaggattacaaacggggattcgggtcgttgaatgacgagggagaaggggagttttggctcggaaacgactacctccatctgctcacacagagaggtagcgtgttgagggtggaacttgaagattgggcgggaaatgaggcgtatgcggagtatcactttcgcgtcgggtcagaagcagagggatacgcacttcaggtgtcgtcgtatgaaggaacggctggggacgccctgattgaggggagcgtagaggaaggggcagagtatacgtcgcacaacaacatgcaattttccacattcgacagagatgccgatcagtgggaggaaaactgtgcggaggtgtacggcggtgggtggtggtataacaattgccaggcggccaacttgaatgggatctactatcccggaggctcgtacgatccacgcaataactcgccatatgaaattgaaaatggagtggtctgggtgtcgttccgaggagcagattactcgttgagagcggtcaggatgaagatcagacccttggtaacccaatgataagctgccttctgcggggcttgccttctggccatgcccttcttctctcccttgcacctgtacctcttggtctttgaataaagcctgagtaggaagg

SEQ ID NO: 21457 - RNA, 2576 nt, synthetic construct
  misc_feature 1..2576: note = source = /note="Description of Artificial Sequence: Synthetic transcript sequence"
  source 1..2576: mol_type = other RNA
gggaaataagagagaaaagaagagtaagaagaaatataagagccaccatggaacacaaagaggtcgtcctcttgctgctcctgtttctcaaatcgggccagggagagcccttggacgattacgtgaacacacagggcgcgagcctgttctcggtaacgaaaaagcagttgggagctggctcaattgaagaatgtgcggcgaaatgcgaagaagatgaagagttcacgtgtcgggcatttcagtatcactcgaaagagcaacagtgcgtgatcatggcagagaaccgaaaatcgtcgatcatcatcagaatgcgggacgtcgtgctgttcgaaaagaaagtgtacctgtcagagtgtaagacgggtaatgggaaaaactataggggcacaatgtcaaagactaagaatgggattacatgtcagaaatggtcgtccacgtcccctcacagaccaagattctcgcctgctacgcatccgtccgagggcttggaggagaactattgtcgcaacccagataacgatccccaagggccttggtgctacaccacagaccccgagaagcggtatgattactgcgatattcttgaatgcgaggaggagtgtatgcactgctccggagagaactacgatggaaagatctccaagacaatgtccggactggaatgtcaggcctgggactcacagtcgccccatgcacacggttacattcctagcaaattcccgaataagaaccttaagaagaattactgccggaacccggaccgagagcttcgcccttggtgtttcacaaccgaccccaacaagagatgggagctgtgtgacattccgagatgtacaacaccaccgccgtcatcgggtccaacctatcaatgtctgaagggaacgggtgagaactatcggggaaacgtcgcggtcacagtgagcgggcacacgtgccagcactggtcggcgcagacaccccacacacataatcggacgccagaaaacttcccttgtaagaatctggatgagaactactgcagaaacccagacggtaaaagagccccgtggtgccatactacgaacagccaagtgcgatgggaatattgtaagatcccgtcgtgcgactcatcgccagtaagcactgaacaacttgcaccgacggctcctcccgagttgacgcctgtggtgcaagattgttaccatggcgatgggcagtcatacaggggaactagcagcaccaccacgacgggcaaaaagtgtcagtcgtggtcctccatgacaccacaccggcaccaaaagactccggagaattacccaaatgcgggtctgaccatgaattactgtaggaaccctgacgcggacaaaggtccatggtgctttaccaccgatccctccgtacgctgggaatactgtaacttgaagaaatgctcggggacagaagcctccgtggtagcccctccgccagtcgtgctgcttcccgacgtggagacaccgtccgaagaggactgtatgtttggtaacggaaagggatatagagggaaaagggcgacgacggtgactgggacgccctgtcaggactgggcagcgcaagagccgcaccgccacagcatctttactcccgaaaccaatccaagggccggacttgaaaagaactattgccggaatccggatggggacgtcggaggtccgtggtgttatactacaaaccctagaaaactctacgattattgcgatgtaccgcaatgtgccgctccctccttcgactgcggaaagcctcaagtcgagcctaagaagtgtcccgggagagtggtgggcgggtgcgtagcccacccgcattcgtggccctggcaggtatcgttgagaacgagatttgggatgcacttttgtggcggtacgcttatctcccctgagtgggtcttgacagctgcgcattgcttggagaagtcccctcggccgtcctcatacaaggtcatcttgggagcccatcaggaggtgaatctggagccccatgtccaagaaattgaggtatcgaggttgtttctcgaaccgacacgcaaggacatcgcactgctgaaacttagctcccctgccgtcatcacagacaaagtcatcccagcgtgcctccccagccccaattacgtagtggcggatagaaccgagtgcttcatcacgggatggggcgagacacaggggacgttcggagctggcctccttaaagaggcccagcttcccgtaatcgaaaacaaagtatgcaaccgctatgagtttctcaatggacgcgtgcagagcacagagctttgcgccggacacctcgcgggagggaccgatagctgccagggtgacagcggagggccgttggtgtgtttcgaaaaagacaagtatatcttgcaaggtgtgaccagctggggacttgggtgcgcgaggcccaataagccgggagtctatgtgagagtctcacgcttcgtcacatggattgagggagtgatgaggaacaactgataagctgccttctgcggggcttgccttctggccatgcccttcttctctcccttgcacctgtacctcttggtctttgaataaagcctgagtaggaag

SEQ ID NO: 21458 - RNA, 1283 nt, synthetic construct
  misc_feature 1..1283: note = source = /note="Description of Artificial Sequence: Synthetic transcript sequence"
  source 1..1283: mol_type = other RNA
gggaaataagagagaaaagaagagtaagaagaaatataagagccaccatgtcgcggtcgggtaccgatccccagcagaggcagcaggcctccgaagcagatgcggctgccgcgacgttcagggccaacgaccaccaacacattcggtacaacccattgcaagacgagtgggtcttggtgtcggcccaccgcatgaaacggccctggcagggtcaggtggagccgcaactgcttaagacggtgccccgacatgatccgttgaacccactctgtccaggggcgatcagagctaatggagaagtgaatccgcagtatgacagcacatttttgtttgacaatgattttcccgcgttgcagcccgatgcacctagccccggaccttcggatcatccgctgtttcaggcaaagagcgctcggggcgtgtgcaaggtcatgtgcttccacccgtggtcggacgtcacattgcctcttatgtcggtccctgagattagggccgtggtggatgcatgggcctccgtcacggaggagctcggagcgcaatatccctgggtgcagattttcgagaacaaaggggccatgatggggtgttcaaatccacaccctcattgccaggtctgggcgtcctcattcctgcccgacatcgcacagagagaggagaggagccagcaggcgtacaaatcacagcacggggagcctctgcttatggaatactcacggcaggaactccttcgcaaggagagactcgtactgacatcagaacattggcttgtactggtacccttctgggcaacgtggccctaccagactctcttgcttccccgacgccacgtccgaaggttgccggagttgactccggcggagcgcgacgacttggcctcgatcatgaaaaagctccttacgaaatatgataatctctttgagacttccttcccgtactccatgggttggcatggagcgcccaccggatcggaagcaggggcgaactggaaccattggcagctccacgcgcactattatccgccgcttctccggtcggctacagtcagaaagttcatggtgggctacgaaatgctggcccaggcgcaaagggacctcacacccgaacaagcagctgaacgactgagagcgctgcctgaggtacactaccatctcggacaaaaggatcgcgaaaccgccacgatcgcatgataagctgccttctgcggggcttgccttctggccatgcccttcttctctcccttgcacctgtacctcttggtctttgaataaagcctgagtaggaag

SEQ ID NO: 21459 - RNA, 1538 nt, synthetic construct
  misc_feature 1..1538: note = source = /note="Description of Artificial Sequence: Synthetic transcript sequence"
  source 1..1538: mol_type = other RNA
gggaaataagagagaaaagaagagtaagaagaaatataagagccaccatggcgtcggagagcggtaaactttggggtggacgattcgtcggggcagtagaccccatcatggagaagtttaacgcgtcgattgcctatgacagacatctctgggaagtagacgtgcaaggatccaaagcctattcacgcgggctggaaaaggccggactgttgacgaaggcagagatggaccagatccttcatgggttggataaagtcgctgaagagtgggcccagggaaccttcaagctcaattcgaatgacgaagatatccacaccgccaacgagcgcagacttaaagaactgattggagcgacagccggtaaactgcacaccggaaggtcacggaacgaccaggtggtcactgatcttaggctgtggatgaggcagacgtgcagcacgctgtcggggttgctttgggagttgatccggacgatggtcgatcgagctgaggcagagagagatgtacttttccccgggtatacacatttgcaacgcgcccagcccatccggtggtcccactggatcttgtcccacgcggtggctctgacacgcgatagcgaacggctccttgaagtccgcaagagaatcaatgtcctccctttgggatccggtgcgattgccggaaatccactgggagtggaccgggaactcttgagggcagagctcaactttggcgcaattaccttgaactcaatggacgcaacctcggagagggacttcgtagcggagtttctcttttgggcgtccctttgcatgactcatttgtcacgcatggcggaggatctgatcttgtactgtacaaaagagttttccttcgtccagctctcagacgcgtactcgacgggatcgagcctgatgccgcagaagaaaaacccagactcattggagctcatccggtcgaaggccgggagggtgttcgggagatgcgcagggctccttatgacgcttaagggacttccgtcaacttacaataaggatctccaagaagataaagaagccgtgtttgaagtcagcgacactatgagcgcagtgttgcaagtagccacgggcgtgatctcgacgctgcagatccatcaggagaatatgggacaggcgctgtccccggatatgctcgcgacagatttggcttattacctcgtccggaaggggatgcccttcagacaggcgcacgaggcgtcgggaaaggcggtattcatggccgaaacaaaaggcgtggcgttgaaccagctgtcgctgcaagaattgcagacgatctcgcctctcttttccggtgatgtgatttgtgtatgggactatgggcactcggtggagcagtacggggcattgggcggtacagcgaggtcatcagtggactggcagattagacaggtgcgcgctctccttcaagcgcaacaggcctgataagctgccttctgcggggcttgccttctggccatgcccttcttctctcccttgcacctgtacctcttggtctttgaataaagcctgagtaggaag

SEQ ID NO: 21460 - RNA, 1508 nt, synthetic construct
  misc_feature 1..1508: note = source = /note="Description of Artificial Sequence: Synthetic transcript sequence"
  source 1..1508: mol_type = other RNA
gggaaataagagagaaaagaagagtaagaagaaatataagagccaccatggacccctacatgattcagatgtccagcaagggaaaccttccctcgatcctcgatgtccacgtgaatgtcggaggacgctcatccgtacccgggaagatgaagggccggaaggcccgctggagcgtcagaccttccgacatggccaaaaagacgtttaatccgatcagggcgattgtggacaatatgaaggtcaaaccgaacccaaacaaaacgatgattagcctgtccatcggggacccgacagtgtttgggaatctccccactgatccagaagtgacacaggcgatgaaggatgcgttggattccggaaagtacaacggttatgcgccgagcattgggttcctgtcaagccgggaggagattgcaagctattatcactgccccgaagcgccgctggaggccaaagacgtgattttgacgtcgggttgcagccaagcgattgacctctgccttgcggtactggccaatcctggtcagaacatcttggtgcccagaccgggtttttcgctctacaaaacactggccgaatcgatgggtatcgaggtcaaactctacaacctgttgcccgagaagtcatgggaaattgatctgaaacagcttgaatatcttatcgatgaaaagacagcctgtcttattgtaaacaatccgtcgaatccttgtgggtcggtattctcgaaaaggcacctccaaaagatccttgcggtcgcagcgaggcaatgcgtgcctatcctggcggatgagatctacggagacatggtattctccgactgcaaatatgagccgctggctacgttgtcgacggatgtgccaatcctctcgtgtggtggattggcgaagcggtggctcgtgccggggtggcgactcggatggattcttatccacgaccgcagagatatctttggaaacgagatccgagatggcctggtcaaactgtcgcagaggatcttggggccttgtacgattgtacagggtgcattgaagtccatcttgtgccgcactcccggagagttctatcataataccctctcattcttgaaatcaaacgcggatctctgctatggcgcacttgctgcgatccccggattgaggcccgtcagaccgagcggagcgatgtacttgatggtagggatcgaaatggaacattttcccgaatttgagaatgacgtcgagttcaccgagcggcttgtggccgaacagtcagtgcattgtctgccggccacctgtttcgaataccccaacttcatccgggtggtcatcactgtgcctgaggtcatgatgttggaggcatgctcgcgcatccaagagttttgcgagcagcattaccactgcgctgagggaagccaggaagagtgtgacaagtgataagctgccttctgcggggcttgccttctggccatgcccttcttctctcccttgcacctgtacctcttggtctttgaataaagcctgagtaggaag

SEQ ID NO: 21461 - RNA, 2252 nt, synthetic construct
  misc_feature 1..2252: note = source = /note="Description of Artificial Sequence: Synthetic transcript sequence"
  source 1..2252: mol_type = other RNA
gggaaataagagagaaaagaagagtaagaagaaatataagagccaccatggctgcgcccatgactcccgcagcaagaccggaggactacgaggcagcattgaatgccgccctcgcagacgtgcccgagcttgcaaggttgctggaaattgatccctatctcaagccctacgccgtcgattttcagcgccggtacaagcagttctcccaaattctcaagaacattggcgagaacgaaggaggtatcgacaagttttcacggggttatgagtcgttcggggtccaccggtgcgccgacggagggctgtattgtaaggagtgggcgcctggggcggaaggggtgtttcttacgggagatttcaatggatggaatcccttctcatacccgtacaagaaattggactacggaaagtgggagttgtatattccaccgaagcagaacaaatcagtgcttgtgcctcatggatccaaacttaaagtcgtgattacatcgaaaagcggggagatcctctaccgcatctcaccgtgggcgaaatatgtagtcagggaaggggataacgtcaactacgattggatccactgggaccccgagcattcatacgaattcaaacactcaaggccgaagaagccccgatcgctccggatctacgaaagccacgtgggaatttcctcacatgaaggaaaggtggcctcgtacaaacactttacgtgcaatgtccttcctcgaatcaaaggtctgggatacaattgcatccagcttatggcgattatggagcatgcctattatgcgtcctttggctaccagatcacctcgttcttcgcggcgagctcacgatatggaactccagaggagttgcaagaattggtagacaccgcccactcaatgggtatcattgtccttcttgacgtggtgcacagccatgccagcaagaactcggcggatggcctcaacatgttcgacgggacagactcatgctacttccacagcgggcctaggggtactcatgatctctgggactcgcgcctttttgcgtactcgagctgggaaatcctccgctttctgctgtcgaatatcaggtggtggctggaggagtatcggttcgatggtttccgctttgatggagtcacgagcatgctttaccatcatcacggggtgggccagggattctcgggcgactattcggaatacttcgggcttcaagtagacgaggatgcgttgacctacctcatgctcgccaatcacttggtccacacgttgtgtcctgattcgatcacaatcgccgaggacgtgtcggggatgccagcgctctgttccccgatctcgcaaggtggaggcgggttcgattatcgcctggcgatggcaattcccgacaagtggattcaacttctcaaagagtttaaggatgaggattggaatatgggagacattgtgtacacgctgacgaatcgccggtatcttgagaaatgcatcgcgtatgctgagtcgcacgaccaggcgttggtcggggataagtccctcgcattttggctcatggacgcagaaatgtatacaaatatgtcggtattgactcccttcacacccgtgatcgatcgagggattcagctccacaaaatgatcagattgattacgcacggtttgggcggagaggggtatttgaacttcatgggaaacgaatttggtcatccagagtggctcgacttcccgcgcaaaggaaataacgagtcctaccactacgcaaggaggcagtttcatcttacggatgatgaccttctgagatataagtttcttaacaactttgacagggacatgaaccgcctcgaagagagatacggttggttggctgctcctcaagcatacgtatccgaaaagcacgaagggaataagatcatcgcattcgaacgggcaggactcctgtttatcttcaactttcacccgtcgaaatcatatacggactatcgagtcggaacagcgctgccgggcaaattcaagattgtactggattcagatgcggctgagtacggaggccatcagagacttgaccactccaccgacttcttctcggaagcgttcgagcacaacggaaggccgtactcacttctggtctatatcccctcgcgggtagcactcatcttgcaaaatgtagatctcccgaattgataagctgccttctgcggggcttgccttctggccatgcccttcttctctcccttgcacctgtacctcttggtctttgaataaagcctgagtaggaag

SEQ ID NO: 21462 - RNA, 2012 nt, synthetic construct
  misc_feature 1..2012: note = source = /note="Description of Artificial Sequence: Synthetic transcript sequence"
  source 1..2012: mol_type = other RNA
gggaaataagagagaaaagaagagtaagaagaaatataagagccaccatggcgcatgtacgcgggcttcaactgcctggctgcctggcgcttgcggcattgtgttcgctggtccattcgcagcacgtattcctcgcccctcagcaagcacgctcccttcttcaaagagtacggcgagcaaacacattcttggaggaggtcaggaaaggcaatttggaacgggaatgtgtcgaggagacttgctcatatgaagaggcttttgaagcgctggagtcgagcacagccacagatgtgttttgggccaagtacaccgcatgcgaaacagcgcggacgccgagggacaaattggcggcctgcctcgaagggaactgtgccgaggggttgggaacaaactatagaggacatgtgaatatcacgcgcagcgggatcgagtgtcagttgtggcgctcgcggtacccgcacaaaccggagattaactcgaccacccaccccggagcggatctccaagagaacttttgtcgcaatcccgactcctccacgacaggtccatggtgttacacgaccgaccctactgtaaggcggcaggaatgctcaatccccgtgtgcgggcaggatcaggtaacagtcgcgatgactccaagatccgaagggtcctcagtgaaccttagcccacctctggagcagtgcgtcccggaccgaggacagcagtaccagggaagattggctgtgacaacgcacggactgccgtgtctcgcatgggcatcggcgcaggcgaaagccctttccaagcatcaggatttcaattccgcggtccagttggtagaaaacttctgtcggaaccccgatggtgatgaggagggtgtgtggtgctatgtggcggggaaacccggcgattttggatactgcgacctcaattactgcgaggaagcggtggaagaggaaacgggtgacggactggatgaggactcagacagggcgatcgaagggaggacggcaacctcagaatatcagacgtttttcaacccgcggacgttcggttcgggagaggccgactgtggactgcggcctctcttcgaaaagaaaagccttgaagataagaccgaaagggaattgctcgaatcctacattgatgggagaatcgtggaggggtcggacgcagagatcggaatgtcgccgtggcaagtcatgctctttcgcaagtcgccccaagagctcctctgcggtgcgtccctcatttcagataggtgggtcctcactgctgcgcactgcctgctctatccgccgtgggataagaatttcactgaaaacgacttgcttgtcagaattggaaagcactcaaggacgcggtacgaacggaatattgagaaaatcagcatgttggagaagatctacatccaccccagatacaactggcgagagaatttggacagggatatcgcgctcatgaagctcaagaaacccgtagcattttccgactatatccatcctgtctgtttgccggacagagagactgcagcgtcattgcttcaggcggggtataagggaagagtcacggggtggggaaatcttaaggagacatggacagccaatgtagggaaaggacagccctcggtattgcaagtggtgaatctccccatcgtggaacggccagtgtgcaaggatagcacacgcatccgcattacggacaacatgttttgtgccgggtataaaccggatgaaggaaaaaggggagatgcatgcgaaggagacagcggagggccgttcgtgatgaaaagccccttcaacaataggtggtaccagatgggtatcgtgtcgtggggtgagggatgtgacagagatgggaagtacggtttctatacgcacgtgtttcggctgaagaagtggattcagaaggtgattgaccagttcggagagtgataagctgccttctgcggggcttgccttctggccatgcccttcttctctcccttgcacctgtacctcttggtctttgaataaagcctgagtaggaag

SEQ ID NO: 21463 - RNA, 2726 nt, synthetic construct
  misc_feature 1..2726: note = source = /note="Description of Artificial Sequence: Synthetic transcript sequence"
  source 1..2726: mol_type = other RNA
gggaaataagagagaaaagaagagtaagaagaaatataagagccaccatgggtccgtggggctggaagcttagatggacagtcgcgctcctccttgcagcagcaggaactgcggtcggagatcgatgcgagcgcaacgagttccaatgccaagatgggaagtgtatttcgtacaagtgggtctgcgatggatcagcggaatgtcaggacggaagcgatgagagccaagaaacatgcctctcagtgacatgcaagtcgggagacttctcgtgcggaggacgcgtaaacagatgtattccacagttttggcgctgcgatggtcaggtggactgcgacaacggttcagatgaacagggatgtcctccgaaaacgtgctcacaagacgagtttcgctgccatgatggaaagtgcatttcgcggcagttcgtatgtgattcggatcgggactgtctggacggctcggacgaagcgtcatgcccggtacttacttgcgggccagcctcattccaatgcaacagctcaacgtgcattccccagctgtgggcctgtgacaatgatcctgattgtgaggacggtagcgacgagtggccgcagagatgtaggggtttgtacgtattccaaggagactcaagcccctgttccgcctttgagtttcactgcctgtcgggtgaatgcatccactccagctggcgatgtgatggtgggcccgactgcaaagataagagcgacgaggagaattgcgcggtcgcgacgtgcagacccgatgagttccagtgctccgatggaaactgcatccacgggagccggcagtgtgatcgcgagtacgattgtaaagacatgtcagacgaggtcggatgcgtgaacgtcacgttgtgcgagggtccgaacaagtttaagtgccattcgggcgaatgtattacgctcgataaagtctgcaacatggcgcgagattgtagggattggtcagacgaacccatcaaggagtgcggcactaacgagtgtttggacaataacggcgggtgttcgcacgtctgcaatgatctcaaaattgggtatgagtgtctctgtcctgacggattccagctggtcgcgcagcgcagatgcgaggacatcgacgagtgccaggaccccgacacatgttcgcagttgtgtgtcaaccttgaaggagggtacaagtgccagtgcgaggagggatttcagcttgacccgcacacgaaagcatgtaaagcggtggggtccattgcgtatttgtttttcacaaacagacatgaagtgcggaagatgacccttgatcgcagcgaatatacgtcactgatccctaatcttaggaatgtcgtggcccttgacacggaggtagcatcaaatagaatctactggtccgacctctcacagagaatgatctgttcaacacagttggatcgggcgcacggggtgtcgtcgtacgatacggtaattagccgcgacatccaggcgccagacggactcgcggtcgactggatccatagcaacatctactggacagactccgtgttgggaaccgtatccgtagctgacacaaagggagtgaagcggaaaactctttttagagagaacggcagcaaaccgagagcaatcgtggtcgatccggtgcatggattcatgtattggaccgattggggaacgccagccaaaatcaagaaaggcggtttgaatggggtcgacatctactcgctggtgactgagaatattcagtggccaaacgggatcaccttggacttgttgtcggggaggttgtattgggtggactcaaagctccactcgatcagctcgatcgacgtgaacggcggaaataggaaaactattctcgaagatgagaaaagactggcccaccccttctcgctcgcggtgttcgaggacaaagtattttggacagacatcatcaacgaagcgatcttttcagccaaccgcctgacagggtcggatgtcaatctcttggccgaaaaccttctgagcccggaagatatggtcttgtttcacaatttgacccaacccagaggtgtgaattggtgcgaacggacgacattgtcgaacggaggttgccagtatctctgtctccctgcaccccagattaatccccattcacccaagttcacgtgtgcgtgcccagacggaatgcttcttgcgagggacatgagatcctgtctcaccgaagcggaagcggcagtggccacacaagagacttcgactgtccgccttaaagtgtcctcgacggcggtccgaactcagcatacgaccacacgacccgtgcccgatacctcgcggttgcccggagcaacaccggggttgacgacagtagaaatcgtaaccatgagccaccaggcacttggagatgtcgcaggcagaggcaatgagaagaaacccagctcggtcagagccctcagcatcgtgctgcctattgtgctgcttgtgtttctctgtttgggtgtgttcttgttgtggaagaactggcgccttaagaatatcaactcgattaacttcgataatccggtataccagaaaaccacagaggatgaagtgcatatttgtcacaaccaagatggctattcgtacccgtccaggcaaatggtatcacttgaggacgacgtggcctgataagctgccttctgcggggcttgccttctggccatgcccttcttctctcccttgcacctgtacctcttggtctttgaataaagcctgagtaggaag

SEQ ID NO: 21464 - RNA, 1805 nt, synthetic construct
  misc_feature 1..1805: note = source = /note="Description of Artificial Sequence: Synthetic transcript sequence"
  source 1..1805: mol_type = other RNA
gggaaataagagagaaaagaagagtaagaagaaatataagagccaccatggcggtcgagtcgcaaggtggacggcctcttgtgcttggtttgctcctttgtgtactcggccctgtcgtgtcacacgccgggaagattttgttgatccccgtggacggatcacattggctttcgatgctcggagccatccagcagttgcagcaaagggggcatgagattgtggtcctggctccggacgcgtcgctctacattcgcgatggtgcattctatactcttaagacatatccagtgcccttccagcgcgaagatgtcaaagagtcatttgtctcactgggacacaacgtattcgagaacgactccttcttgcagagagtcatcaagacgtacaagaaaatcaaaaaggatagcgccatgctgttgtcagggtgctcgcacttgcttcacaacaaggagctgatggcgtcactggcggagtcgagctttgatgtcatgttgacggacccgtttttgccgtgtagcccgatcgtggcgcaatacttgtcccttcccaccgtattcttcctccacgcgcttccctgtagcctggagtttgaggcgacccagtgtcccaatcccttttcatacgtgcctcgaccgttgtcatcacattcggaccacatgacgttcctccagcgggtgaagaatatgctcatcgccttttcccaaaacttcctctgcgacgtcgtctactccccttacgccacgctggcatccgagtttctgcagcgagaggtgactgtgcaagaccttctctcgtcggcatcagtatggttgttccgatcagatttcgtaaaggactacccaagacccatcatgcccaacatggtgttcgtagggggaatcaattgcctccaccagaatccgctgagccaggagtttgaagcgtatatcaacgcgtcgggggaacacggaattgtcgtgtttagcctggggtcgatggtatcggagattcccgaaaagaaggcgatggcaatcgcagacgcactcggaaagatcccccagacagtcctttggcggtatacagggacgaggccgagcaatttggcaaacaatacgatccttgtgaaatggttgccgcagaatgatcttctcggtcatcccatgacaagagccttcatcacgcacgccggttcgcatggggtatatgaatcgatttgcaatggcgtgcctatggtgatgatgccgctctttggtgaccagatggacaatgcgaaaaggatggaaaccaagggagcaggagtcaccctgaatgtgctggaaatgacatccgaggatctcgaaaacgcgcttaaagcggtcattaacgacaaatcgtataaggaaaacatcatgaggttgagctcccttcacaaagatagacctgtcgagccattggacctggccgtgttttgggtcgagttcgtgatgcggcacaagggagcgccacacttgaggccagctgcgcatgatctgacgtggtatcagtaccactccctcgatgtgattggcttcctgctggcagtcgtgttgactgtggcgtttatcacattcaaatgttgcgcttacggctaccggaagtgcttgggaaagaaaggacgcgtgaaaaaggcccataagtcgaaaacacattgataagctgccttctgcggggcttgccttctggccatgcccttcttctctcccttgcacctgtacctctcaaacaccattgtcacaaacaccattgtcacaaacaccattgtcacaaacaccattgtcatggtctttgaataaagcctgagtaggaag

SEQ ID NO: 21465 - RNA, 476 nt, synthetic construct
  misc_feature 1..476: note = source = /note="Description of Artificial Sequence: Synthetic transcript sequence"
  source 1..476: mol_type = other RNA
gggaaataagagagaaaagaagagtaagaagaaatataagagccaccatggcgctctggatgcgattgcttcctctcctggctttgcttgcactgtggggtccagacccggcagccgcgttcgtgaatcagcatttgtgcggaagccaccttgtcgaagcgttgtatctggtctgcggggagagggggttcttttacacacccaagacccgcagagaggccgaggatttgcaagtaggccaggtggaactcggtgggggacccggagccggatcgctccaaccgctcgcgctggaagggtcactgcagaaacggggaatcgtggagcagtgttgtacgtccatttgctcgctttaccagcttgagaactattgtggctgataagctgccttctgcggggcttgccttctggccatgcccttcttctctcccttgcacctgtacctcttggtctttgaataaagcctgagtaggaag

SEQ ID NO: 21466 - RNA, 1031 nt, synthetic construct
  misc_feature 1..1031: note = source = /note="Description of Artificial Sequence: Synthetic transcript sequence"
  source 1..1031: mol_type = other RNA
gggaaataagagagaaaagaagagtaagaagaaatataagagccaccatggaaacacccgcgtggcccagggtacctaggccggagacagcagtagcgagaacgcttctcctcggatgggtattcgcccaagtggcgggagcgtccggcactaccaacactgtcgcggcatataacttgacgtggaaatcaacaaacttcaaaactatccttgagtgggagccgaagcccgtcaatcaagtctatacagtccaaatctccacgaagtcaggcgattggaagagcaagtgcttctacaccacagatacagagtgcgacctgactgacgaaatcgtcaaggatgtaaagcagacgtatttggctagagtattctcgtacccagcgggaaacgtcgagagcaccggttcagccggagaaccgctgtacgaaaattcgccggagtttactccctatcttgagacaaatttggggcagcccaccatccagtcgtttgaacaggtgggtacgaaggtgaacgtcaccgtggaagatgagaggacattggtccgccggaacaatacttttctttccctcagagatgtatttgggaaagaccttatctacacattgtactattggaagtcgtcgtcgtccggtaaaaagacggctaaaacgaacacgaacgagttcctcatcgacgtggacaaaggcgagaattactgcttttcagtccaggccgtgatcccctcgcgaacggtgaatcggaaatccacggactcgccagtggagtgtatgggacaggagaaaggagaatttcgggaaatcttctacattattggggccgtcgtattcgtggtgatcattctggtgattattctcgcgattagcctgcacaagtgtcgcaaagcaggggtggggcagtcatggaaggaaaatagccctctgaacgtgtcgtgataagctgccttctgcggggcttgccttctggccatgcccttcttctctcccttgcacctgtacctcttggtctttgaataaagcctgagtaggaag

SEQ ID NO: 21467 - RNA, 470 nt, synthetic construct
  misc_feature 1..470: note = source = /note="Description of Artificial Sequence: Synthetic transcript sequence"
  source 1..470: mol_type = other RNA
gggaaataagagagaaaagaagagtaagaagaaatataagagccaccatggccctttggatgagattgcttcctcttctcgcgctcctcgcgctgtggggtccagaccccgcagctgcctttgtgaatcagcatctgtgcggaagccacttggtcgaagccctgtacttggtatgcggggagcgggggttcttctacaccgacaaaacagaagcggaagatttgcaagtcggacaggtggagttgggtgggggtcccggagcaggctcgcttcaaccgctggcgctcgagggatcacttcagaagagggggatcgtggagcagtgttgcacgtccatttgttcgctgtatcagctcgagaactattgtaactgataagctgccttctgcggggcttgccttctggccatgcccttcttctctcccttgcacctgtacctcttggtctttgaataaagcctgagtaggaag

SEQ ID NO: 21468 - RNA, 470 nt, synthetic construct
  misc_feature 1..470: note = source = /note="Description of Artificial Sequence: Synthetic transcript sequence"
  source 1..470: mol_type = other RNA
gggaaataagagagaaaagaagagtaagaagaaatataagagccaccatggccctctggatgagactgttgccgctcctggcacttcttgcgctctgggggcctgaccccgcagcggccttcgtgaatcagcatttgtgtggatcgcacctggtagaagcgctttacttggtctgcggtgagcgggggtttttctataccaagccgacagaggccgaagatttgcaagtgggccaggtcgagctcggtgggggtcccggagctggatcgctccagccactggcgcttgagggatcactgcagaaaagggggattgtggagcagtgttgcacgagcatctgctccctttatcaattggaaaactactgtaactgataagctgccttctgcggggcttgccttctggccatgcccttcttctctcccttgcacctgtacctcttggtctttgaataaagcctgagtaggaag

SEQ ID NO: 21469 - RNA, 470 nt, synthetic construct
  misc_feature 1..470: note = source = /note="Description of Artificial Sequence: Synthetic transcript sequence"
  source 1..470: mol_type = other RNA
gggaaataagagagaaaagaagagtaagaagaaatataagagccaccatggcgctgtggatgcggcttctccctcttctcgcgttgttggcactttggggacccgacccagctgccgcctttgtcaaacagcacctctgtgggtcgcatctggtagaggccctgtatttggtgtgcggggaaaggggtttcttctacacaccggaaaccgaggcggaagatttgcaagtcggacaggtggagcttggtggcggaccgggagcggggagcctgcagccccttgcattggaagggtcgctgcagaagcgcggaattgtggagcagtgctgtacgtcaatctgctccctctaccaactcgagaactattgtaattgataagctgccttctgcggggcttgccttctggccatgcccttcttctctcccttgcacctgtacctcttggtctttgaataaagcctgagtaggaag

SEQ ID NO: 21470 - RNA, 1322 nt, synthetic construct
  misc_feature 1..1322: note = source = /note="Description of Artificial Sequence: Synthetic transcript sequence"
  source 1..1322: mol_type = other RNA
gggaaataagagagaaaagaagagtaagaagaaatataagagccaccatggcggccttgcgacagccgcaagtcgcggaactgctggctgaagcccggagagcgttccgcgaggagttcggagccgaacccgagctcgcggtatcagcaccaggacgggtgaaccttattggggaacatactgattacaaccaggggctcgtattgcccatggccctggaacttatgaccgtacttgtcgggtcaccccgcaaggacggcttggtgagcttgcttacgacatccgagggtgctgatgaaccgcagcgacttcagttccctctccctacggcgcaacggtcattggagccagggacgcccagatgggccaattatgtgaaaggagtgattcagtattatcccgcagcgccgctccctggattttcagcagtagtggtgtcgagcgtacctcttggtggaggactgtcgtcgtccgcatccctcgaggtcgcaacctacacgtttttgcagcagctctgtccggactcggggaccatcgcggcgagagcccaagtgtgccaacaggcggagcacagctttgccggcatgccatgtggaatcatggaccagttcatctcgctgatgggtcagaaaggacatgctctcctgatcgattgccgctcgctggaaacatcgctggtgcccttgtccgacccgaagctggctgtgctgatcacgaattccaacgtccgccatagcttggcctcaagcgagtacccggtgaggaggcgacagtgcgaggaggtcgcccgagcgcttggaaaagaatcgttgagggaggtgcagcttgaagagcttgaagcggcgagggatcttgtctcaaaggaggggtttcgacgcgcgaggcacgtcgtcggggagattcggagaacagcccaggcggctgccgcactcagacgcggggattatagggcgtttggacggttgatggtcgagtcgcacagaagcttgagggacgactacgaagtgtcgtgcccggagctggaccagctcgtagaagcggctcttgcggtccccggtgtgtacgggtccagaatgacgggcggtggcttcggagggtgtacagtcactctcttggaagcgtcggccgcaccccacgcgatgcggcatatccaagaacactacggaggtactgcaaccttctatcttagccaggcggcagatggtgcgaaggtattgtgtctctgataagctgccttctgcggggcttgccttctggccatgcccttcttctctcccttgcacctgtacctcttggtctttgaataaagcctgagtaggaag

SEQ ID NO: 21471 - RNA, 398 nt, synthetic construct
  misc_feature 1..398: note = source = /note="Description of Artificial Sequence: Synthetic transcript sequence"
  source 1..398: mol_type = other RNA
gggaaataagagagaaaagaagagtaagaagaaatataagagccaccatggctcttagttcacaaatctgggcagcgtgcctcttgctgcttctgctcttggccagcctgacctcggggtccgtgttccctcagcagactgggcagctcgcggagttgcagccccaagacagggccggagcgcgtgcatcttggatgcccatgtttcagcgcagacgacggcgggatacacattttccgatctgtattttctgctgcggatgctgtcacagatcgaaatgcggtatgtgttgtaagacgtaatgagctgccttctgcggggcttgccttctggccatgcccttcttctctcccttgcacctgtacctcttggtctttgaataaagcctgagtaggaag

SEQ ID NO: 21472 - RNA, 1427 nt, synthetic construct
  misc_feature 1..1427: note = source = /note="Description of Artificial Sequence: Synthetic transcript sequence"
  source 1..1427: mol_type = other RNA
gggaaataagagagaaaagaagagtaagaagaaatataagagccaccatgggagagcctgggcagtctcccagcccacggagctcccatggatcaccgccaaccctctctactctgacccttctgcttctgctgtgtggacatgctcattcccaatgcaagatccttcgctgcaatgccgaatatgtctcatctactctttctcttcggggtgggggttcatccggagcactcaggggcggtgggggtggtggcagaggtgggggagtcggatccggtggactttgccgcgcactccgctcttacgccctctgcaccagacggaccgcacggacctgccgcggtgacctggccttccactctgctgtccacggaatcgaggatctgatgattcagcacaattgctcacgccagggaccgaccgcaccaccgccacctcgcggacccgctctgcccggagctggatcaggtctgccagccccggacccttgtgactacgaaggacgcttctcacggctgcacggtaggccacccgggtttctgcattgtgccagctttggcgaccctcacgtccggtcatttcaccaccatttccatacttgtcgcgtgcaaggcgcatggccccttctcgacaacgacttcctgttcgtgcaggctacctcatcacctatggccctcggcgccaatgccactgccaccagaaagctgaccattatcttcaaaaacatgcaagagtgcattgaccagaaggtgtaccaggccgaagtggacaatctccccgtggccttcgaggatgggtccatcaacggcggtgataggccagggggatccagccttagcattcagactgccaaccccggaaatcatgtcgagattcaggcagcttatatcggaaccaccattatcatccgccaaactgccggtcagctgagcttcagcatcaaggtggctgaagatgtggccatggctttctcagcagagcaagatctccagctgtgcgtgggtggctgtccccctagccagaggctctcacggtccgagcgcaacagacggggagccattaccatcgacactgccaggcggctgtgcaaagaaggcctgccggtcgaagatgcctacttccattcttgtgtgttcgacgtgcttatctcaggcgacccgaacttcaccgtggctgctcaggctgctctcgaggacgcacgcgcttttctccccgaccttgaaaagctgcacctgttcccaagcgacgctggagtgccgctgtcctctgcaaccctgctcgcacctctcctttccggactgtttgtcctttggctttgcatccaatgataataggctgccttctgcggggcttgccttctggccatgcccttcttctctcccttgcacctgtacctcttggtctttgaataaagcctgagtaggaag

SEQ ID NO: 21473 - RNA, 1403 nt, synthetic construct
  misc_feature 1..1403: note = source = /note="Description of Artificial Sequence: Synthetic transcript sequence"
  source 1..1403: mol_type = other RNA
gggaaataagagagaaaagaagagtaagaagaaatataagagccaccatgtcctttatccctgtggccgaagattcggacttccccattcacaacctcccgtacggtgtattctccacacgcggtgaccccagaccgagaatcggggtagccattggagatcagatcttggacttgtcgatcatcaaacatctcttcaccggcccagtcctctcgaaacatcaggacgtgtttaatcagcccacccttaactccttcatgggactgggacaggccgcatggaaggaagcgcgggtctttcttcaaaaccttttgagcgtgtcacaggcgaggctgagggacgatactgagctgcggaagtgtgcgtttatctcacaagcgtccgcgacaatgcatcttccagctactatcggggactatacagatttctacagctcccgccagcacgcgacgaatgtcggaatcatgttccgagacaaagagaatgcgttgatgcctaactggttgcacctcccggtgggctatcacggtcgagccagctcggtcgtggtgtcaggaacgccgattagaaggcctatgggtcagatgaaacccgacgactcgaaaccgccggtatatggcgcgtgcaagttgctggatatggagcttgaaatggcgttcttcgtcggtcccggtaaccggttgggtgaacccattcccatcagcaaggcccatgaacatatcttcggcatggtgctcatgaacgactggtcagctagagatattcagaagtgggagtatgtgcccttggggccctttctcgggaagtcgtttgggacgaccgtcagcccctgggtcgtaccgatggacgctcttatgccgtttgccgtaccaaatcccaaacaggaccctaggcctctcccgtacttgtgtcacgatgagccctacacgttcgatatcaacctctcggtcaatctcaaaggagagggaatgtcgcaggcggcaacgatttgcaagtcaaatttcaagtatatgtactggaccatgcttcaacaactcacacaccacagcgtgaatgggtgtaacttgcgcccaggggacctcctcgcatccggaactatttccggtcccgagccagagaactttggatcaatgcttgaactgtcgtggaaggggacaaagcctattgaccttggaaatggacaaacgcggaaatttctgctggatggagatgaggtgatcattacggggtactgccagggagatggttaccgcatcgggtttggacagtgcgcagggaaggtgctccctgcgcttctgccctcgtgataagctgccttctgcggggcttgccttctggccatgcccttcttctctcccttgcacctgtacctcttggtctttgaataaagcctgagtaggaag

SEQ ID NO: 21474 - protein, 14 aa, Homo sapiens
LLDNWDSVTSTFSK

SEQ ID NO: 21475 - protein, 9 aa, Homo sapiens
WQEEMELYR

SEQ ID NO: 21476 - protein, 7 aa, Homo sapiens
LHELQEK

SEQ ID NO: 21477 - protein, 10 aa, Homo sapiens
VQPYLDDFQK

SEQ ID NO: 21478 - protein, 12 aa, Homo sapiens
ASSVVVSGTPIR

SEQ ID NO: 21479 - protein, 12 aa, Homo sapiens
GEGMSQAATICK

SEQ ID NO: 21480 - protein, 10 aa, Homo sapiens
HLFTGPVLSK

SEQ ID NO: 21481 - protein, 16 aa, Homo sapiens
IGVAIGDQILDLSIIK

SEQ ID NO: 21482 - protein, 9 aa, Homo sapiens
LGEPIPISK

SEQ ID NO: 21483 - protein, 13 aa, Homo sapiens
VFLQNLLSVSQAR

SEQ ID NO: 21484 - protein, 12 aa, Homo sapiens
WEYVPLGPFLGK

SEQ ID NO: 21485 - protein, 17 aa, Homo sapiens
AHEHIFGMVLMNDWSAR

SEQ ID NO: 21486 - protein, 13 aa, Homo sapiens
GTKPIDLGNGQTR

SEQ ID NO: 21487 - protein, 22 aa, Homo sapiens
HQDVFNQPTLNSFMGLGQAAWK

SEQ ID NO: 21488 - protein, 11 aa, Homo sapiens
QHATNVGIMFR

SEQ ID NO: 21489 - protein, 9 aa, Homo sapiens
ASWMPMFQR

SEQ ID NO: 21490 - protein, 16 aa, Homo sapiens
DTHFPICIFCCGCCHR

SEQ ID NO: 21491 - protein, 9 aa, Homo sapiens
MICSTQLDR

SEQ ID NO: 21492 - protein, 13 aa, Homo sapiens
LAHPFSLAVFEDK

SEQ ID NO: 21493 - protein, 13 aa, Homo sapiens
NVVALDTEVASNR

SEQ ID NO: 21494 - protein, 8 aa, Homo sapiens
TCSQDEFR

SEQ ID NO: 21495 - protein, 11 aa, Homo sapiens
FGMHLQAATPK

SEQ ID NO: 21496 - protein, 14 aa, Homo sapiens
KPEEVDDEVFYSPR

SEQ ID NO: 21497 - protein, 7 aa, Homo sapiens
LAEQYAK

SEQ ID NO: 21498 - protein, 12 aa, Homo sapiens
LQAFQGYQVTMK

SEQ ID NO: 21499 - protein, 8 aa, Homo sapiens
SLGMIFEK

SEQ ID NO: 21500 - protein, 14 aa, Homo sapiens
VAASDWTFLHCLPR

SEQ ID NO: 21501 - protein, 10 aa, Homo sapiens
GEYLPLLQGK

SEQ ID NO: 21502 - protein, 23 aa, Homo sapiens
GLTLSWIGDGNNILHSIMMSAAK

SEQ ID NO: 21503 - protein, 31 aa, Homo sapiens
LLLTNDPLEAAHGGNVLITDTWISMGQEEEK

SEQ ID NO: 21504 - protein, 31 aa, Homo sapiens
LSTETGFALLGGHPCGLTTQDIHLGVNESLT

SEQ ID NO: 21505 - protein, 10 aa, Homo sapiens
YMLWLSADLK

SEQ ID NO: 21506 - protein, 13 aa, Homo sapiens
CNAEYVSSTLSLR

SEQ ID NO: 21507 - protein, 11 aa, Homo sapiens
GGGVGSGGLCR

SEQ ID NO: 21508 - protein, 22 aa, Homo sapiens
GPALPGAGSGLPAPDPCDYEGR

SEQ ID NO: 21509 - protein, 8 aa, Homo sapiens
AFLPDLEK

SEQ ID NO: 21510 - protein, 20 aa, Homo sapiens
LHGRPPGFLHCASFGDPHVR

SEQ ID NO: 21511 - protein, 9 aa, Homo sapiens
NMQECIDQK

SEQ ID NO: 21512 - protein, 18 aa, Homo sapiens
VAPEEHPVLLTEAPLNPK

SEQ ID NO: 21513 - protein, 11 aa, Homo sapiens
VVDLMAHMASK

SEQ ID NO: 21514 - protein, 15 aa, Homo sapiens
HLEINPDHPIVETLR

SEQ ID NO: 21515 - protein, 9 aa, Homo sapiens
YIDQEELNK

SEQ ID NO: 21516 - protein, 9 aa, Homo sapiens
DQLIYNLLK

SEQ ID NO: 21517 - protein, 14 aa, Homo sapiens
GEMMDLQHGSLFLR

SEQ ID NO: 21518 - protein, 17 aa, Homo sapiens
ALESPERPFLAILGGAK

SEQ ID NO: 21519 - protein, 15 aa, Homo sapiens
LGDVYVNDAFGTAHR

SEQ ID NO: 21520 - protein, 10 aa, Homo sapiens
IIQLLDDYPK

SEQ ID NO: 21521 - RNA, 1295 nt, synthetic construct
  misc_feature 1..1295: note = source = /note="Description of Artificial Sequence: Synthetic transcript sequence"
  source 1..1295: mol_type = other RNA
gggaaataagagagaaaagaagagtaagaagaaatataagagccaccatgggtgtcttgcttactcagcggaccttgctgagccttgtgttggcgctcctctttccgtccatggcctcaatggccatgcatgtcgcccagcctgccgtggtcctggcatcatcacgaggaattgcgtcctttgtgtgtgagtatgcgtcgccgggaaaggcgaccgaagtaagagtgactgtactgaggcaggcggatagccaggtgacagaggtctgtgcagcgacttatatgatggggaacgagttgacgttcttggatgactcgatctgcacggggacatcgtccgggaatcaagtgaacttgacgattcaagggctccgcgctatggacactggcctgtacatttgcaaggtggaacttatgtacccgccaccctactatcttggaattggtaatgggacacagatctacgtgatcgaccctgagccctgccccgactccgaccaggaaccgaagagctcggacaagacgcacacatcgcccccttcgcctgctcccgagcttctcggtggcagctccgtctttctgttcccgccgaaaccaaaagataccctcatgatctcacggacccccgaagtaacatgtgtggtagtcgatgtctcgcacgaggatccagaggtgaagttcaattggtatgtggacggcgtcgaagtccataacgccaaaaccaaaccccgggaagagcagtacaactcgacctatcgcgtagtctccgtcttgacggtactccaccaggactggttgaacgggaaagagtacaagtgcaaagtcagcaacaaggcactccctgcgcccatcgagaaaacaatctcgaaagcaaagggacagcccagagagccccaagtgtacacgctcccgccgtcacgcgacgaattgacgaaaaatcaggtgtcacttacgtgtttggtgaagggattctacccgtccgatatcgccgtcgaatgggagtcgaatggacagcccgagaacaactataagacgactcccccagtgctcgactcagatggttcgttctttctgtactcgaagctcacagtagataagtcgaggtggcagcagggaaatgtgttttcgtgctcggtcatgcacgaagcgttgcataatcactatactcaaaaatcacttagcctgtcacccggaaagtgataagctgccttctgcggggcttgccttctggccatgcccttcttctctcccttgcacctgtacctcttggtctttgaataaagcctgagtaggaag

SEQ ID NO: 21522 - RNA, 1400 nt, synthetic construct; identical to SEQ ID NO: 1662
  misc_feature 1..1400: note = source = /note="Description of Artificial Sequence: Synthetic transcript sequence"
  source 1..1400: mol_type = other RNA

SEQ ID NO: 21523 - RNA, 2039 nt, synthetic construct; identical to SEQ ID NO: 1666
  misc_feature 1..2039: note = source = /note="Description of Artificial Sequence: Synthetic transcript sequence"
  source 1..2039: mol_type = other RNA

SEQ ID NO: 21524 - RNA, 800 nt, synthetic construct; identical to SEQ ID NO: 1650
  misc_feature 1..800: note = source = /note="Description of Artificial Sequence: Synthetic transcript sequence"
  source 1..800: mol_type = other RNA

SEQ ID NO: 21525 - RNA, 1325 nt, synthetic construct
  misc_feature 1..1325: note = source = /note="Description of Artificial Sequence: Synthetic transcript sequence"
  source 1..1325: mol_type = other RNA
gggaaataagagagaaaagaagagtaagaagaaatataagagccaccatgacaacatattcagataaaggggccaagccagaacggggtagattcctccactttcactcggtcacgttctgggtagggaacgccaagcaggcggcgtcattctattgcagcaaaatgggattcgaacctttggcctaccgcggtttggagactggttcgcgcgaggtagtaagccacgtgatcaagcaggggaagatcgtgtttgtgttgtcgtcggcactgaacccgtggaacaaagaaatgggcgaccacctcgtcaagcatggggacggagtgaaagacattgcctttgaggtggaggattgtgactacatcgtccagaaagcgcgagagaggggagcgaaaatcatgagggagccctgggtcgagcaggataagtttggaaaggtgaaatttgcggtcctccagacatacggagacacgacacatacgttggtggaaaagatgaattacatcggtcagtttctgccggggtacgaggcaccggccttcatggaccctctccttcctaaactgcccaaatgctcgctcgaaatgattgaccacattgtcggaaatcagcccgaccaggagatggtgtccgcgtcagagtggtatctcaagaacttgcagttccaccgcttctggtcagtcgatgatactcaagtacatactgaatactcctccttgagatcgatcgtagtcgcgaattacgaagagtccatcaagatgcccattaatgagccagcaccggggaaaaagaagtcgcaaatccaagagtacgtggactataacggaggagccggtgtgcagcatattgcgctcaaaaccgaagatatcattacggctatccgccacttgcgggaacgagggctggaatttctcagcgtcccttccacgtattacaaacagcttagagaaaaacttaagaccgcgaagattaaggtaaaggagaacatcgatgcgcttgaggagcttaagatccttgtggactatgatgagaagggctatctgttgcaaatcttcaccaagcccgtccaagataggccgaccctgttccttgaggtgattcagagacacaaccatcaggggtttggagctggaaacttcaattcgctgtttaaagcattcgaggaagaacagaatctccggggaaatcttacaaacatggaaacgaatggtgtagtccccggcatgtgataagctgccttctgcggggcttgccttctggccatgcccttcttctctcccttgcacctgtacctcttggtctttgaataaagcctgagtaggaag

SEQ ID NO: 21526 - RNA, 1442 nt, synthetic construct
  misc_feature 1..1442: note = source = /note="Description of Artificial Sequence: Synthetic transcript sequence"
  source 1..1442: mol_type = other RNA
gggaaataagagagaaaagaagagtaagaagaaatataagagccaccatgcatgtcagatcgctcagagcagccgctccccactccttcgtggcactctgggcgcctctgtttctcttgcggtcggcattggcagatttctcgttggacaatgaggtccattcatcgttcatccaccgcaggctgaggagccaggagcgccgagagatgcagcgcgaaatcctgtcgatccttggacttccccaccggcctcggccacacttgcaaggaaaacataacagcgcccctatgttcatgctggatctctataacgcgatggccgtagaggagggaggaggaccgggagggcaggggttttcctacccatataaggccgtcttttcgacacagggtccgcccttggcgtcattgcaagattcccatttccttacggacgcggatatggtaatgagctttgtcaacctggtcgaacacgacaaggagtttttccatccccgctaccaccaccgcgagttcagattcgacctgtcaaagattccggaaggggaggctgtgacggcagcggaatttcggatctacaaagactatatccgggagcggtttgacaatgagacattccgaatttccgtctatcaggtactccaagagcaccttggtagggaatcggaccttttcctgcttgactcgagaactttgtgggcgtcggaggaagggtggctggtgtttgacatcacggccactagcaatcactgggtagtcaaccccaggcataatcttggactgcagctctcagtagagacattggatggtcagtcaatcaaccctaagcttgctggccttatcggacgacatgggccgcaaaacaagcagccgtttatggtggcgttcttcaaagccacggaggtacattttagatcgattaggtcaaccggcagcaagcagagatcccagaacagatccaagacgccgaaaaatcaggaagcgctccggatggccaacgtggcggagaattcgtcctcggatcagcgacaggcgtgcaaaaagcatgaattgtatgtgtcctttcgcgatcttggttggcaggattggatcatcgcacccgaggggtatgcggcgtactactgtgaaggcgagtgcgcgttccccttgaattcatacatgaacgcgaccaaccacgccattgtgcaaactctcgtccacttcatcaatcccgaaaccgtccctaaaccctgttgtgcccctacacagctgaatgccatttcagtgctctacttcgacgactcaagcaatgtgattttgaaaaagtacagaaacatggtggtgagggcgtgcgggtgccactgataataggctgccttctgcggggcttgccttctggccatgcccttcttctctcccttgcacctgtacctcttggtctttgaataaagcctgagtaggaag

SEQ ID NO: 21527 - RNA, 1469 nt, synthetic construct
  misc_feature 1..1469: note = source = /note="Description of Artificial Sequence: Synthetic transcript sequence"
  source 1..1469: mol_type = other RNA
gggaaataagagagaaaagaagagtaagaagaaatataagagccaccatggggcctcccgggtcgccgtggcagtgggtcaccttgctgcttgggttgctgttgcctcctgctgcgcccttttggttgctgaatgtgctctttccacctcacacgacaccaaaggccgagctctcgaatcacaccaggccggtgattttggtgcccgggtgccttgggaaccaactggaagccaaattggacaagcccgatgtggtgaactggatgtgttatcgaaagacagaggacttcttcactatttggcttgacctcaatatgtttctcccgctgggagtggactgctggatcgataatacccgcgtcgtatacaacagatccagcggtcttgtatcaaacgctcccggagtccagattagagtccccggttttggaaaaacttacagcgtagaataccttgattcatcaaaacttgcgggatatctgcatacgctggtgcagaacctcgtgaataacgggtacgtcagagatgaaacagtccgagccgcaccgtacgactggcgcttggaaccgggccaacaggaggagtattaccgcaaactcgccggacttgtcgaggagatgcacgcagcctacggaaagccagtgtttctgattggtcattcactggggtgtctccacttgctctattttctcttgagacagcctcaagcgtggaaagaccggttcatcgacggctttatctccctcggtgcgccatggggaggctccatcaagcctatgctcgtcttggcatcgggcgataaccagggcatcccgattatgagcagcatcaaacttaaggaggagcagaggattactacgacatcgccctggatgttcccgtccagaatggcctggcccgaagatcatgtattcatcagcacgccctcgttcaattacacagggcgagacttccagaggtttttcgcggatctccacttcgaggaagggtggtacatgtggcttcaatcgcgggacttgctggcgggactccctgcgcctggggtggaagtatattgtttgtacggagtcggccttcccacgccacggacttatatctacgaccacgggttcccctatacggatccggtaggagtactttatgaggacggggatgatacagtggcgacgcggagcacggagttgtgcggattgtggcagggtcggcagccacagccggtgcacctgttgccgctgcacggaattcagcatctgaatatggtgttttcgaacctcacccttgaacatatcaacgcaatcctgctcggtgcgtatcgccagggaccgccagcttcacccacagcatcgccggagccgccaccgcctgaatgataataggctgccttctgcggggcttgccttctggccatgcccttcttctctcccttgcacctgtacctcttggtctttgaataaagcctgagtaggaag

SEQ ID NO: 21528 - RNA, 949 nt, synthetic construct
  misc_feature 1..949: note = source = /note="Description of Artificial Sequence: Synthetic transcript sequence"
  source 1..949: mol_type = other RNA
gggaaataagagagaaaagaagagtaagaagaaatataagagccaccatggaaaaagtcagacgagagggggttaaggtgatgcccaatgctattgtgcaatccgttggagtcagcagtggcaagttacttatcaagctgaaagacggcaggaaggtagaaactgaccacatagtggcagctgtgggcctggagcccaatgttgagttggccaagactggtggcctggaaatagactcagattttggtggcttccgggtaaatgcagagctacaagcacgctctaacatctgggtggcaggagatgctgcatgcttctacgatataaagttgggaaggaggcgggtagagcaccatgatcacgctgttgtgagtggaagattggctggagaaaatatgactggagctgctaagccgtactggcatcagtcaatgttctggagtgatttgggccccgatgttggctatgaagctattggtcttgtggacagtagtttgcccacagttggtgtttttgcaaaagcaactgcacaagacaaccccaaatctgccacagagcagtcaggaactggtatccgatcagagagtgagacagagtccgaggcctcagaaattactattcctcccagcaccccggcagttccacaggctcccgtccagggggaggactacggcaaaggtgtcatcttctacctcagggacaaagtggtcgtggggattgtgctatggaacatctttaaccgaatgccaatagcaaggaagatcattaaggacggtgagcagcatgaagatctcaatgaagtagccaaactattcaacattcatgaagactgataataggctggagcctcggtggccatgcttcttgccccttgggcctccccccagcccctcctccccttcctgcacccgtacccccgtggtctttgaataaagtctgagtgggcggc

SEQ ID NO: 21529 - RNA, 1382 nt, synthetic construct
  misc_feature 1..1382: note = source = /note="Description of Artificial Sequence: Synthetic transcript sequence"
  source 1..1382: mol_type = other RNA
gggaaataagagagaaaagaagagtaagaagaaatataagagccaccatgtcctcgaagggaagcgtagtcttggcgtattccggaggccttgacacttcatgtattctggtctggctcaaggagcaggggtacgacgtcatcgcctatctggctaacatcggacaaaaggaagatttcgaggaagcgcgcaagaaggcgctgaaactcggagccaaaaaggtattcatcgaagatgtgtcgcgggagtttgtcgaagagtttatctggcctgcgattcagtcgtcagcactttatgaggacagatacctccttggaacttcactggcccgaccgtgcatcgcgcgcaaacaggtagagatcgcacagagggagggggcgaaatatgtctcgcatggtgcaactgggaaaggtaatgatcaggtgcggttcgaactctcctgctactcgttggcaccccagatcaaagtgatcgctccgtggaggatgcccgagttttacaaccgattcaagggaagaaacgatctgatggagtatgcgaagcagcatggaatcccgatccccgtgacgccgaagaatccctggagcatggacgagaatcttatgcacatttcatacgaggccgggatcttggaaaatccgaaaaaccaggcgcctccggggttgtacaccaaaacacaagacccagccaaagcgcccaacacccccgatattcttgaaattgagtttaagaaaggggtgcccgtcaaggtgacgaatgtcaaggacggcacgacccaccaaacatcgttggaactgtttatgtacttgaatgaggtcgcgggaaaacacggtgtggggagaattgacattgtggaaaatcggtttatcgggatgaagagccggggaatctacgaaacaccagcgggaacgattctgtaccatgcccacctcgatattgaagcgtttacaatggacagggaagtgagaaagattaaacaggggcttggtttgaaattcgcagagctggtatatacgggcttctggcatagccctgaatgtgagttcgtacgccactgcatcgcaaagagccaggaaagagtggagggaaaggtgcaagtctccgtgctcaagggtcaggtctacatcctcggtagggagtcgcctctttcactctacaacgaggagttggtatcgatgaacgtgcagggagactatgaacccaccgatgccacagggttcatcaacatcaactccttgcgcctcaaggagtatcaccggcttcagtcgaaagtaacggctaagtgataagctgccttctgcggggcttgccttctggccatgcccttcttctctcccttgcacctgtacctcttggtctttgaataaagcctgagtaggaag

SEQ ID NO: 21530 - RNA, 968 nt, synthetic construct
  misc_feature 1..968: note = source = /note="Description of Artificial Sequence: Synthetic transcript sequence"
  source 1..968: mol_type = other RNA
gggaaataagagagaaaagaagagtaagaagaaatataagagccaccatgaaaaagactcagacatggatcctgacgtgtatctacctccagctgctgttgttcaatccgttggtaaagactgagggtatctgccgcaacagagtgacgaataacgtgaaagacgtgacaaagctggtcgcaaatctccccaaggactatatgatcaccctcaagtacgtccctggcatggatgtgcttccgtcacactgctggatctcagaaatggtcgtccagcttagcgattcgttgaccgaccttcttgataagttctcgaacatttccgaagggctctccaactactccatcattgacaaattggtgaatattgtggatgacctggtggaatgcgtcaaggagaattcgtcaaaagaccttaagaagtcctttaagagccccgaacctcgactttttacgcccgaagagttcttccggatcttcaataggtcgatcgatgcctttaaggactttgtagtcgcgtcagaaacgtcggattgtgtggtatcgtccacattgtcgccggagaaggacagcagggtgtcagtaacaaaaccctttatgttgccgccagtggcggcctcgagccttcgcaatgactcgagctcgtcgaaccggaaagcgaaaaatccgccaggagatagctcactgcattgggcagcgatggcgctccccgcattgttctcattgattatcgggtttgccttcggagccctctattggaagaaacgccagcccagcctcacgagagctgtagagaacattcagatcaacgaggaggataacgagatttcgatgctccaagagaaagagagggaattccaagaggtctgataataggctgccttctgcggggcttgccttctggccatgcccttcttctctcccttgcacctgtacctcttggtctttgaataaagcctgagtaggaag

SEQ ID NO: 21531 - DNA, 2102 bp, synthetic construct
  misc_feature 1..2102: note = source = /note="Description of Artificial Sequence: Synthetic transcript sequence"
  source 1..2102: mol_type = other DNA
taatacgactcactatagggaaataagagagaaaagaagagtaagaagaaatataagagccaccatgtcagagcggaaagaaggaaggggaaagggtaaagggaagaaaaaggaacgcggatcggggaagaaaccggaatcagccgctggctcacagtcgccggcactgccaccccggctcaaggagatgaagagccaggaatccgcggctgggtcgaagcttgtgttgagatgcgaaacgtccagcgagtactcatcacttcggtttaagtggtttaagaatggaaacgagctcaataggaagaacaagccccagaatatcaagatccagaagaaacccgggaaatccgaacttcggatcaacaaagcgtccctggcggactccggggagtacatgtgtaaagtcatcagcaaactcggtaacgattcagcctccgctaatatcacgatcgtcgagtcgaatgagatcattaccggtatgccggcgtccacggagggagcatatgtgtcgtcggaaagccccatcaggatttccgtgtcgactgaaggagcaaatacaagctcgtccaccagcacgagcacgacggggacgtcacatctcgtgaaatgcgccgaaaaggagaaaactttctgcgtcaatggtggagaatgcttcatggtgaaggatctttcaaacccctcccggtacctctgcaaatgtccgaacgagtttaccggggaccggtgtcagaactatgtaatggccagcttctataaagccgaagagctgtaccagaagcgagtgttgacgatcacaggcatctgcattgcactccttgtcgtaggaatcatgtgtgtggtggcgtattgcaaaacaaagaagcagcgcaaaaagttgcacgaccgactgcgccagtcgttgaggagcgagcgaaacaatatgatgaatattgcaaatgggccccatcacccgaacccgccacccgagaacgtacaactggtgaaccagtatgtctcgaaaaacgtcatctcgtcggaacatatcgtggaacgggaggcggaaacaagcttcagcacatcgcactacacgagcactgcccaccactccacgaccgtgacacagacgcccagccactcatggtcgaacggtcatacagagtcgatcctgtcagagtcccattcagtaattgtaatgtcgtccgtcgaaaattcaaggcactcaagccccacgggagggcctagaggccgcctcaacgggactggcggtcctcgagaatgtaattccttcttgagacacgcgagggaaacgcccgattcgtacagagattcaccccactcggagcgctatgtcagcgcgatgaccactcccgccagaatgtcgccggtggattttcatacaccttcgtcccctaagtcaccgcctagcgagatgtcgccgcctgtatcatccatgacagtgagcatgccctcgatggccgtgtcaccgtttatggaggaggaaaggcccctgttgttggtcacaccaccaagacttcgggagaaaaagttcgaccaccatccgcagcagttctcgtcgttccaccataatccggcgcacgatagcaactccctcccggcatcgcctctccggattgtcgaagatgaggagtacgaaacgacccaagaatacgaacccgcgcaagagccggtaaagaagctcgcaaatagcagaagggcgaaacgcaccaaaccaaacggacacattgcgaacaggcttgaggtcgacagcaatacctcgtcccagtcgtcaaactccgagagcgagacagaggacgagcgagtcggggaggacacaccttttctcggaatccaaaacccgcttgcagcgtcgttggaagccacgccagcgtttagacttgcggactcacggactaaccctgccggaaggttctcgacgcaagaggagattcaggctaggttgtcctcggtgattgctaatcaggaccccatcgccgtgtgataataggctgccttctgcggggcttgccttctggccatgcccttcttctctcccttgcacctgtacctcttggtctttgaataaagcctgagtaggaaggcggccgctcgagcatgcatctaga

SEQ ID NO: 21532 - RNA, 659 nt, synthetic construct
  misc_feature 1..659: note = source = /note="Description of Artificial Sequence: Synthetic transcript sequence"
  source 1..659: mol_type = other RNA
gggaaataagagagaaaagaagagtaagaagaaatataagagccaccatggacactaggaacaaagcgcaacttcttgtcttgcttacgctgctctccgtcctgttctcccagacgtccgcatggcccttgtaccgagcgccttcagctttgcggctgggcgatagaatcccttttgaaggggccaacgagcccgatcaggtgtcgcttaaggaggacatcgacatgctccagaacgccctcgcggagaacgatacaccgtactatgacgtatcgcggaacgcgcgacatgcagacggagtgtttacaagcgatttctcgaaattgctgggacagctcagcgccaagaaatatctcgaatcactgatggggaaaagagtgtcgtcaaatatctcagaagatccagtcccggtaaagcggcactcggatgcggtgttcacggacaattacacccgcctccgcaagcaaatggccgtcaagaagtatcttaattccattttgaatggaaaaaggagctcggagggtgaatcgcccgactttccggaggagttggaaaagtgataataggctgccttctgcggggcttgccttctggccatgcccttcttctctcccttgcacctgtacctcttggtctttgaataaagcctgagtaggaag

SEQ ID NO: 21533 - DNA, 779 bp, synthetic construct
  misc_feature 1..779: note = source = /note="Description of Artificial Sequence: Synthetic transcript sequence"
  source 1..779: mol_type = other DNA
taatacgactcactatagggaaataagagagaaaagaagagtaagaagaaatataagagccaccatgcgccggtggttgggatgcgtatgtttcgcgctcgtccaagccgacagcccgtccgcgcctgtcaatgtcacagtccgccaccttaaagctaattcggcggtcgtgtcgtgggatgtattggaagatgaagtagtgatcgggtttgcgatttcccagcagaagaaagacgtccgaatgcttcgctttatccaagaggtgaatacgacgacaaggtcatgtgcgctctgggacttggaagaggacactgagtacatcgtgcatgtacaggccatttcaattcagggtcaatcacccgcaagcgagcccgtgctgttcaagacgccaagagaggccgaaaagatggccagcaaaaacaaggatgaggtcaccatgaaagaaatggggaggaaccagcagctcagaaccggtgaggtactgatcatcgtggtggtgttgttcatgtgggcaggggtgatcgcactcttttgccggcagtatgatatcattaaagacaatgagcccaacaacaacaaggaaaagactaagtccgcgtcggaaacgtcgacaccggagcaccagggaggcggacttctgcggtcgaaaatctgataataggctgccttctgcggggcttgccttctggccatgcccttcttctctcccttgcacctgtacctcttggtctttgaataaagcctgagtaggaaggcggccgctcgagcatgcatctaga

SEQ ID NO: 21534 - RNA, 1238 nt, synthetic construct
  misc_feature 1..1238: note = source = /note="Description of Artificial Sequence: Synthetic transcript sequence"
  source 1..1238: mol_type = other RNA
gggaaataagagagaaaagaagagtaagaagaaatataagagccaccatgccataccagtatcccgcgcttacgcctgagcagaagaaggagctgtcggacatcgctcatcggatcgtcgcacccgggaagggcattctcgcagctgatgaatcgacgggttcaattgcgaagcgactccagtcgatcgggacagaaaataccgaagaaaacagacggttctatcgccagctgttgctcacagcggatgatcgagtgaacccttgcattggaggggtcattctgtttcacgagacactttatcagaaagccgacgatggacgcccgttccctcaagtgatcaagagcaaaggcggagtggtcgggatcaaagtggacaagggagtggtaccccttgctggaactaatggtgagacaacgacgcagggtttggacgggctcagcgaacggtgcgcccagtacaaaaaggatggagccgatttcgccaaatggaggtgtgtactcaagatcggtgagcacaccccgtccgcacttgcgattatggaaaatgcaaatgtcttggcgaggtacgcgtcaatttgtcagcaaaacggcattgtaccgatcgtcgaacccgagatcctcccggacggggatcatgacttgaaaaggtgtcagtatgtaacggagaaggtgctcgcagcggtgtataaggcgctgtcagaccaccacatctacttggagggtactcttctgaaaccaaacatggtaactcccggacatgcatgcacacaaaagttttcgcacgaagagatcgccatggctactgtcaccgccttgcgcagaaccgtgccgcctgcagtgacgggtatcacgtttttgtccggagggcagtcggaggaagaggcctcgatcaatctgaacgcaatcaacaagtgtcccctgctgaagccctgggcgcttacgttcagctacggacgggcgttgcaggcgagcgccctcaaagcgtggggagggaagaaagagaacttgaaagcggcgcaagaggagtacgtcaagagagctcttgcgaactccctcgcctgccaggggaaatacacaccgtcaggacaggccggtgccgcagcgtcggaatcactttttgtgtccaatcatgcgtattgataagctgccttctgcggggcttgccttctggccatgcccttcttctctcccttgcacctgtacctcttggtctttgaataaagcctgagtaggaag

SEQ ID NO: 21535 - RNA, 866 nt, synthetic construct
  misc_feature 1..866: note = source = /note="Description of Artificial Sequence: Synthetic transcript sequence"
  source 1..866: mol_type = other RNA
gggaaataagagagaaaagaagagtaagaagaaatataagagccaccatgagcatgctgttttacacgctcattaccgcgttcctcatcggaattcaggccgagccgcattcagaatcgaacgtacccgctggacacacaatcccacaagcccactggacgaaactccagcactccctggacactgcccttagaagagcgcggtcagcccctgcagcagcgattgctgcacgggtagcggggcagacaaggaatatcacggtggacccacgcttgtttaagaagcgaaggttgaggtcgccgagagtcctgttttcgacgcagccgcccagagaagcagccgatacgcaagacctcgacttcgaggtcgggggtgcggctcccttcaatcgcacccatcgctccaagcggtcgtcgagccatcctatctttcaccggggagagttctcagtctgcgattccgtgtcggtgtgggtcggtgataaaaccactgcaacagacatcaaaggtaaagaagtgatggtacttggcgaggtaaacatcaacaattcggtgtttaagcagtatttcttcgaaacgaagtgtcgagatcccaatccggtggatagcgggtgcagggggatcgattccaaacactggaactcctactgtaccacaactcatacatttgtgaaggcgttgactatggacggaaaacaggcggcgtggcggttcatccgcattgacaccgcgtgcgtctgtgtccttagccgaaaggcggtgcgcagggcctaagctgccttctgcggggcttgccttctggccatgcccttcttctctcccttgcacctgtacctcttggtctttgaataaagcctgagtaggaag

SEQ ID NO: 21536 - RNA, 2255 nt, synthetic construct
  misc_feature 1..2255: note = source = /note="Description of Artificial Sequence: Synthetic transcript sequence"
  source 1..2255: mol_type = other RNA
gggaaataagagagaaaagaagagtaagaagaaatataagagccaccatgttgaggggtagatcgttgtcggtcacgagccttggaggattgccgcagtgggaagtcgaagaactcccggtggaagaactcttgctgttcgaagtggcatgggaggtgacgaataaggtgggtggtatctacacagtgattcagaccaaggccaagacgacagcggacgagtggggagagaactattttcttattgggccctattttgaacacaacatgaaaacccaagtagaacagtgcgagccggtaaacgatgctgtgcgcagggcagtcgatgcgatgaataagcacggctgccaagtccactttgggcgctggttgatcgaagggtccccatacgtggtgctcttcgacattggctatagcgcgtggaatttggacaggtggaagggtgacctttgggaggcgtgctcagtcggaatcccctaccatgatcgagaggcaaatgacatgctgatctttggcagcctcacagcctggttcttgaaggaggtaacggaccacgcagatgggaaatacgtggtcgcacagttccatgagtggcaggcggggattggacttatcctgtcgcgagcgaggaagttgcccatcgcgacaatcttcacaacgcacgccacactgcttggtaggtatttgtgtgccgcgaatatcgatttctacaatcacttggacaaattcaacattgataaagaggccggagaacggcaaatctaccatcggtactgcatggagagagcgtccgtgcactgtgcccacgtgttcactacggtgagcgaaattactgcaatcgaagcagagcacatgctgaagagaaaaccggacgtcgtcacgcccaacgggctgaatgtgaagaagttttccgctgtccatgagttccagaaccttcatgctatgtataaagccaggattcaagatttcgtgagagggcatttctacggacatcttgattttgatcttgagaaaacgctgttcctcttcatcgcggggagatacgagttttccaacaagggtgccgacatttttctcgaatcactttcgaggctcaacttcttgttgcggatgcacaaatcggatatcaccgtcatggtctttttcatcatgcccgcgaaaaccaacaacttcaatgtggagacactgaagggacaggcggtccgcaaacaactgtgggacgtagcgcactcggtaaaagaaaagttcggcaaaaagctctacgacgcgctccttcgaggcgagatcccggacctcaacgacatcctcgatcgcgatgacctgaccatcatgaaacgcgcgatcttcagcacacagcgccagtcattgcctcccgtcaccactcataacatgattgacgactcgaccgatccgatcctctcgacaattcggagaattgggttgtttaacaataggacagacagggtgaaggtaatcctccacccggagttcctgtcctccaccagccctttgttgcccatggattatgaggagttcgtacgaggttgtcatctcggtgtgtttccctcatattacgaaccgtggggatatacgcccgctgagtgtactgtaatggggattcccagcgtaacgacgaatctttcgggttttgggtgcttcatgcaagagcacgtagctgatcccacggcatatggaatctacattgtcgataggcgctttagatcacccgacgattcgtgtaaccagttgaccaagtttctttacggattttgcaaacagtcacggagacagcggatcatccagagaaatcggaccgaacgccttagcgatttgctcgattggagatatctgggtaggtactatcagcatgcacggcacttgactctgagccgggcattccccgacaagtttcacgtcgagctcacatcaccgccgacgactgagggattcaaataccctcgcccaagctcagtgcctccttcgccgtcggggtcccaggcatcgtcgccgcagtcgtcagacgtggaggatgaagtagaggacgagcggtatgacgaggaagaagaagccgagcgcgaccgcttgaacatcaagtcgcccttttcgcttagccatgtcccgcatgggaagaaaaagctccacggagaatacaagaattgataagctgccttctgcggggcttgccttctggccatgcccttcttctctcccttgcacctgtacctcttggtctttgaataaagcctgagtaggaag

SEQ ID NO: 21537 - RNA, 2333 nt, synthetic construct
  misc_feature 1..2333: note = source = /note="Description of Artificial Sequence: Synthetic transcript sequence"
  source 1..2333: mol_type = other RNA
gggaaataagagagaaaagaagagtaagaagaaatataagagccaccatgtgggtgacgaaattgctccctgctcttctgctccagcatgtcttgctccatttgcttctcctgccgatcgccatcccttacgcggaagggcagcggaagcggcgcaacactatccatgagttcaagaagtcggccaagacgaccctcatcaaaattgaccccgcattgaagatcaagacaaagaaagtgaacacagcagatcagtgcgccaacagatgcacgcggaacaaagggcttcctttcacatgtaaagcgtttgtgttcgataaggcgcgcaagcaatgtttgtggttcccctttaactcaatgagctccggagtgaagaaggagtttggacatgagttcgatctttacgagaacaaagattacatccggaattgtatcatcggaaaaggcagatcatacaaaggaacagtgtcgattacaaaatcagggatcaagtgtcaaccgtggtcatcaatgattccgcacgagcattcgttccttccctcctcctatcggggtaaagaccttcaagaaaactactgccggaatccccgaggagaggaaggtgggccctggtgctttacatcaaatccagaggtacgctacgaagtctgtgacatcccgcagtgctcggaagtggagtgtatgacatgcaatggggaaagctacagaggattgatggatcacaccgagtccgggaaaatctgccagaggtgggatcaccaaacaccacacaggcataagttcctccccgaaaggtacccggacaaaggtttcgatgataactactgtaggaatccggacgggcagccgaggccatggtgctacactcttgatcctcatactaggtgggagtattgcgcgattaagacgtgcgcggacaataccatgaatgacacggatgtgccactggaaacaactgagtgcatccaggggcagggagagggctatcgcggtacagtcaatacgatctggaacggcatcccgtgccagagatgggactcccagtacccgcatgaacacgacatgactcccgagaatttcaagtgcaaggatttgcgcgagaattactgtcgaaaccccgatggatcggagtcaccctggtgttttacgactgatcccaatatccgagtaggctattgctcgcaaatcccaaattgcgacatgtcacacggtcaagactgctaccggggaaacggaaagaactatatgggtaacctgtcgcagacgaggtcgggtctgacgtgctccatgtgggacaaaaacatggaggatcttcaccgacacatcttttgggaaccggacgcctccaaactcaacgagaactattgtagaaatcccgacgacgacgcgcatgggccgtggtgttataccggaaatcccttgatcccctgggattactgcccgatctcgcggtgtgaaggagacacgacacctaccattgtgaacttggatcatccggtgatttcatgcgcgaaaacgaagcagctgcgggtggtaaacggtattcccaccagaactaacattgggtggatggtgagcctcagatatagaaacaaacatatctgcggtggctcgcttatcaaggaatcgtgggtcttgactgcaaggcagtgttttcccagccgggatcttaaggactacgaggcgtggctcggtatccatgacgtccacggacgcggagatgaaaagtgcaaacaggtgctcaatgtcagccagctcgtgtatgggcccgagggaagcgatcttgtacttatgaagttggcgcgaccggcggtactggacgactttgtatcgacaattgatttgccgaattatggttgcaccattccggagaaaacgtcctgctcagtctacgggtggggttacacggggctgatcaactatgatgggctccttagggtggcacacttgtatatcatggggaacgagaaatgttcgcagcaccaccgcggtaaagtgacgctgaacgaaagcgaaatctgtgcgggagctgagaagattgggtcaggcccttgtgagggagattacggtgggcccctggtctgtgaacagcacaagatgcgcatggtcttgggagtgattgtaccaggacgcggttgtgccatccctaataggcctggaatcttcgtgcgcgtcgcctattacgccaaatggattcacaagatcatccttacatacaaggtgccccagtcgtgataataggctgccttctgcggggcttgccttctggccatgcccttcttctctcccttgcacctgtacctcttggtctttgaataaagcctgagtaggaag

SEQ ID NO: 21538 - RNA, 1112 nt, synthetic construct
  misc_feature 1..1112: note = source = /note="Description of Artificial Sequence: Synthetic transcript sequence"
  source 1..1112: mol_type = other RNA
gggaaataagagagaaaagaagagtaagaagaaatataagagccaccatgtcagcaaagtcgagaactatcgggattatcggtgctcctttcagcaaggggcaaccccgaggtggagtggaggaaggccccaccgtccttcggaaagcaggacttttggagaaactcaaagagcaggaatgcgatgtcaaagattatggagatctgccctttgcagacatcccaaacgattcaccgtttcagattgtgaaaaatccgcgctccgtagggaaggcgagcgaacagcttgcgggtaaagtcgcggaggtgaagaaaaatggacgcatttcgctcgtgttgggaggtgatcattcgttggctatcggatccatctccgggcacgcgagagtacaccccgatcttggtgtcatctgggtagacgcgcacaccgacatcaacacacccctgacgacaacttcggggaaccttcacggacagcctgtctcgttcctcctcaaggagcttaagggaaagattccggacgtaccgggattttcgtgggtgacgccctgtatctcagccaaggacattgtctacatcggtctgcgcgatgtggacccaggcgagcattacatcctcaagacccttggtattaagtacttctccatgacggaagtggacaggttgggtattggaaaagtcatggaagagactttgtcatacctcttgggccggaagaaaagaccgattcatctctccttcgacgtagatggacttgacccaagctttacgcctgccacggggacccctgtcgtaggtgggctgacatatagggaagggctctatatcacggaggagatctacaagaccggcttgctgtcggggttggatatcatggaggtgaatccttcactcgggaaaacacccgaggaagtgacgcggacagtgaacacagccgtggcgatcacgcttgcgtgcttcggactggccagggaagggaaccacaagccgattgactatttgaatccgcccaagtgataagctgccttctgcggggcttgccttctggccatgcccttcttctctcccttgcacctgtacctcttggtctttgaataaagcctgagtaggaag

SEQ ID NO: 21539 - RNA, 818 nt, synthetic construct
  misc_feature 1..818: note = source = /note="Description of Artificial Sequence: Synthetic transcript sequence"
  source 1..818: mol_type = other RNA
gggaaataagagagaaaagaagagtaagaagaaatataagagccaccatgaataagcctctcttgtggatctcggtcttgacgtcccttttggaggcattcgcccacacggacttgtcgggaaaggtattcgtgtttccccgggaaagcgtcactgatcatgtcaatctcatcacgcctctggagaaaccactgcagaactttacactctgctttcgagcctattcggatctgtcaagagcctactcgctcttctcctataacacacagggacgggacaacgagcttcttgtgtacaaggaaagggtaggagagtactcactctacatcggtcgccataaagtgacctccaaagtaatcgaaaagttcccggctcccgtccacatttgtgtatcatgggagtcctcgtcagggatcgcggagttctggattaatgggacaccccttgtgaagaagggactgagacaggggtatttcgtagaagcgcagccgaaaatcgtgttgggtcaggaacaagacagctacggagggaagtttgacaggagccaatcgtttgtgggagagatcggtgatctttacatgtgggactcggtcctgccacccgaaaacatcttgagcgcataccaggggaccccgttgcccgcgaatattctcgattggcaggcgctcaactatgagattcgcggctatgtcattatcaaaccgctggtgtgggtgtgataataggctgccttctgcggggcttgccttctggccatgcccttcttctctcccttgcacctgtacctcttggtctttgaataaagcctgagtaggaag

SEQ ID NO: 21540 - RNA, 1364 nt, synthetic construct
  misc_feature 1..1364: note = source = /note="Description of Artificial Sequence: Synthetic transcript sequence"
  source 1..1364: mol_type = other RNA
gggaaataagagagaaaagaagagtaagaagaaatataagagccaccatgaccctcgacgtcggtccagaagatgagctccccgattgggcagcagcgaaggagttctatcagaaatatgacccgaaggacgtgatcggaagaggagtctcgtcggtagtacgacgctgtgtgcatagagcgaccgggcatgagttcgccgtgaagattatggaagtaactgcggagcgcttgtcgccggagcaattggaagaggtcagagaggccacccggagagaaacacacatcttgcgccaggtcgcgggacatccccacatcatcacgctgattgattcatacgaatcatccagctttatgtttttggtgttcgaccttatgcggaaaggcgagctgttcgattacctgacagagaaagtagcgcttagcgaaaaggaaaccaggtcgatcatgcggtcactccttgaagccgtgtcgtttttgcacgctaacaacatcgtgcatcgcgatcttaaacccgagaatatcttgttggatgacaatatgcagatccggctgtcggacttcgggttctcgtgtcaccttgaaccaggagagaagctgcgcgagttgtgcggaacacccgggtatctggcgcctgagattctcaaatgcagcatggacgaaacacacccgggctacggtaaagaggtggatctctgggcgtgtggggtgatcctttttacgctgctcgcggggtccccacccttttggcatcggaggcagatcctcatgctgcgaatgatcatggaaggacagtatcaattctcctcgcctgagtgggatgacaggtccagcaccgtaaaggacctcatttcccgcttgctgcaagtcgatccggaagccaggcttacggcagaacaggcactgcagcacccgttctttgaacgctgcgagggtagccagccatggaaccttacgccgaggcagagattccgggtcgccgtctggacagtgcttgcggctggaagagtggccctctcaacgcaccgagtccggcccttgacgaaaaatgctcttttgagggacccctacgcgttgaggtcagtaagacacctgattgacaactgcgcattccgcctctacggacactgggtgaagaagggtgagcagcagaatagagcggccctttttcaacatcgacctcctggcccttttcccatcatgggacccgaggaagaaggggattcagcagcgattactgaggacgaggccgtgctcgtactggggtgataagctgccttctgcggggcttgccttctggccatgcccttcttctctcccttgcacctgtacctcttggtctttgaataaagcctgagtaggaag

SEQ ID NO: 21541 - RNA, 335 nt, synthetic construct
  misc_feature 1..335: note = source = /note="Description of Artificial Sequence: Synthetic transcript sequence"
  source 1..335: mol_type = other RNA
gggaaataagagagaaaagaagagtaagaagaaatataagagccaccatgccctcgagcgtgtcgtgggggattctgctccttgcgggactttgctgtctcgtaccggtgtccctcgcccacggagagggaacgtttacatcggacctgtcaaagcagatggaagaggaagcggtccggttgttcatcgagtggttgaaaaacgggggtcccagctccggcgcaccaccgccttcatgataagctgccttctgcggggcttgccttctggccatgcccttcttctctcccttgcacctgtacctcttggtctttgaataaagcctgagtaggaag

SEQ ID NO: 21542 - RNA, 2687 nt, synthetic construct
  misc_feature 1..2687: note = source = /note="Description of Artificial Sequence: Synthetic transcript sequence"
  source 1..2687: mol_type = other RNA
gggaaataagagagaaaagaagagtaagaagaaatataagagccaccatggcgaaaccgcttactgatcaggagaagcgccgacaaatctcgatcagaggtatcgtaggtgtggaaaacgtcgccgagcttaagaaatcgttcaaccgccacttgcatttcacgttggtgaaggaccgcaacgtggcgaccacgcgggattactactttgcattggcccacacagtgcgggatcatctggtcgggaggtggatcagaacacaacagcactactacgataagtgcccgaaaagagtgtattatctttcgcttgagttctacatgggaagaacactccagaatacgatgatcaatcttgggcttcagaacgcatgcgacgaagccatctaccagttgggattggacatcgaagagcttgaagagattgaggaggacgccggactcgggaatggtggactggggcgacttgcggcgtgtttcttggactccatggcgaccctgggcctggcggcatatggatatggaatcagatatgagtatgggatctttaaccagaaaattcgggatggatggcaggtcgaagaagctgacgattggctgagatacgggaatccttgggaaaaatcccgacccgagttcatgctcccggtacatttctacgggaaggtagagcatacaaacaccggcaccaagtggatcgatacccaagtcgtattggcgttgccgtatgacactccggtccccgggtatatgaacaacactgtcaatacaatgcggttgtggtcggccagagcgcccaacgactttaatctccgcgacttcaatgtgggagattacattcaagccgtgctggacaggaacctcgccgagaacatttcgcgggtgctctacccaaatgacaacttcttcgaggggaaagagctgcggcttaaacaggaatacttcgtcgtcgcggcgacgcttcaagatatcattcgacggtttaaggcatccaagttcggttcgacaagaggtgcgggaacggtgtttgatgcctttcccgatcaggtcgccatccagcttaacgatacccaccctgccctcgcaatccctgaactcatgaggatctttgtggatattgagaaacttccctggtcaaaggcgtgggaactgactcaaaagacgttcgcatacacaaaccacacagtactccccgaggcgctggaacgctggccagtagacctggtggagaaactgctgccaaggcacctcgaaatcatctacgagatcaatcagaaacacttggatcggattgtagctcttttccccaaggacgtggatcgcttgaggcgcatgtccctcatcgaggaagaagggtcaaagaggatcaatatggctcatctctgcatcgtaggctcacacgcggtgaacggggtagccaagatccactcggacattgtcaaaacgaaagtctttaaagattttagcgaacttgagcccgataagtttcagaacaagacgaatgggattacgcctcggagatggttgcttctgtgtaatccggggttggctgagcttatcgcggagaaaatcggcgaggactacgtgaaagatctgtcgcaattgacgaaactccattcgtttctgggtgacgatgtattccttcgcgagctcgcaaaagtaaagcaggagaataagctgaagttctcccagtttttggagacagagtataaggtgaagatcaatccgtcaagcatgtttgacgtacaagtaaagcggattcacgagtataagcggcaacttcttaattgcctgcacgtcatcacaatgtataatcgcatcaaaaaggacccgaagaaattgttcgtgcctagaacagtcatcattggtggaaaggctgcacccggataccatatggccaaaatgatcatcaagctgattacgagcgtggccgacgtggtgaataacgacccgatggtcggatcaaaattgaaggtaatctttttggaaaactatagagtctcgcttgcggaaaaggtgattcccgcaacggacctgtcggaacagatctcaaccgctggcacagaggcctcgggaacgggaaacatgaagttcatgttgaatggcgctctcacaattggaaccatggatggagcaaatgtagaaatggcagaggaggctggagaagaaaacttgtttatctttggtatgcgcatcgacgatgtagcggcattggacaaaaagggttacgaagcgaaggagtactacgaggcccttccggagttgaaactcgtcatcgatcagattgacaatggctttttctcgcccaagcagcccgacctcttcaaggacatcatcaatatgctgttctaccacgataggttcaaggtgttcgccgattacgaggcgtatgtcaaatgtcaggataaagtaagccagctctatatgaaccccaaagcctggaatacaatggtgcttaagaatattgcggcgtccgggaaattcagcagcgaccgcacgattaaggagtacgcacagaatatctggaacgtcgagcccagcgacctcaaaatctccttgtcaaacgaatccaacaaggtgaacggaaactgataagctgccttctgcggggcttgccttctggccatgcccttcttctctcccttgcacctgtacctcttggtctttgaataaagcctgagtaggaag

SEQ ID NO: 21543 - protein, 10 aa, Homo sapiens
AMDTGLYICK

SEQ ID NO: 21544 - protein, 14 aa, Homo sapiens
GIASFVCEYASPGK

SEQ ID NO: 21545 - protein, 14 aa, Homo sapiens
ITPNLAEFAFSLYR

SEQ ID NO: 21546 - protein, 10 aa, Homo sapiens
LSITGTYDLK

SEQ ID NO: 21547 - protein, 14 aa, Homo sapiens
IGGFYALSPYPGLR

SEQ ID NO: 21548 - protein, 13 aa, Homo sapiens
DLNHVCVISETGK

SEQ ID NO: 21549 - protein, 14 aa, Homo sapiens
EMGGHHIVALCVLK

SEQ ID NO: 21550 - protein, 9 aa, Homo sapiens
AFEEEQNLR

SEQ ID NO: 21551 - protein, 8 aa, Homo sapiens
EMGDHLVK

SEQ ID NO: 21552 - protein, 8 aa, Homo sapiens
EVVSHVIK

SEQ ID NO: 21553 - protein, 7 aa, Homo sapiens
ATEVHFR

SEQ ID NO: 21554 - protein, 10 aa, Homo sapiens
ESDLFLLDSR

SEQ ID NO: 21555 - protein, 13 aa, Homo sapiens
IPEGEAVTAAEFR

SEQ ID NO: 21556 - protein, 13 aa, Homo sapiens
LDKPDVVNWMCYR

SEQ ID NO: 21557 - protein, 11 aa, Homo sapiens
LEPGQQEEYYR

SEQ ID NO: 21558 - protein, 14 aa, Homo sapiens
SSGLVSNAPGVQIR

SEQ ID NO: 21559 - protein, 13 aa, Homo sapiens
DGEQHEDLNEVAK

SEQ ID NO: 21560 - protein, 14 aa, Homo sapiens
TGGLEIDSDFGGFR

SEQ ID NO: 21561 - protein, 9 aa, Homo sapiens
ELNEALELK

SEQ ID NO: 21562 - protein, 12 aa, Homo sapiens
SVTCTYSPALNK

SEQ ID NO: 21563 - protein, 17 aa, Homo sapiens
TCPVQLWVDSTPPPGTR

SEQ ID NO: 21564 - protein, 13 aa, Homo sapiens
APNTPDILEIEFK

SEQ ID NO: 21565 - protein, 19 aa, Homo sapiens
FAELVYTGFWHSPECEFVR

SEQ ID NO: 21566 - protein, 13 aa, Homo sapiens
FELSCYSLAPQIK

SEQ ID NO: 21567 - protein, 20 aa, Homo sapiens
AVENIQINEEDNEISMLQEK

SEQ ID NO: 21568 - protein, 9 aa, Homo sapiens
LFTPEEFFR

SEQ ID NO: 21569 - protein, 7 aa, Homo sapiens
LVANLPK

SEQ ID NO: 21570 - protein, 12 aa, Homo sapiens
ASLADSGEYMCK

SEQ ID NO: 21571 - protein, 12 aa, Homo sapiens
HADGVFTSDFSK

SEQ ID NO: 21572 - protein, 12 aa, Homo sapiens
HSDAVFTDNYTR

SEQ ID NO: 21573 - protein, 14 aa, Homo sapiens
ELIHISDWLPTLVK

SEQ ID NO: 21574 - protein, 11 aa, Homo sapiens
GVGFVASPLLK

SEQ ID NO: 21575 - protein, 13 aa, Homo sapiens
HSVPVYFPAQDPR

SEQ ID NO: 21576 - protein, 9 aa, Homo sapiens
FLSDEENLK

SEQ ID NO: 21577 - protein, 12 aa, Homo sapiens
VYETDNNIVVYK

SEQ ID NO: 21578 - protein, 13 aa, Homo sapiens
YMEEAIMQPLDHK

SEQ ID NO: 21579 - protein, 17 aa, Homo sapiens
SASETSTPEHQGGGLLR

SEQ ID NO: 21580 - protein, 9 aa, Homo sapiens
IALVLTPLK

SEQ ID NO: 21581 - protein, 11 aa, Homo sapiens
ALANSLACQGK

SEQ ID NO: 21582 - protein, 8 aa, Homo sapiens
ALQASALK

SEQ ID NO: 21583 - protein, 14 aa, Homo sapiens
GILAADESTGSIAK

SEQ ID NO: 21584 - protein, 10 aa, Homo sapiens
LQHSLDTALR

SEQ ID NO: 21585 - protein, 14 aa, Homo sapiens
TQVEQCEPVNDAVR

SEQ ID NO: 21586 - protein, 10 aa, Homo sapiens
AASAMQFFTK

SEQ ID NO: 21587 - protein, 7 aa, Homo sapiens
IVEIYSR

SEQ ID NO: 21588 - protein, 9 aa, Homo sapiens
VHIGYLPNK

SEQ ID NO: 21589 - protein, 16 aa, Homo sapiens
GEEGGPWCFTSNPEVR

SEQ ID NO: 21590 - protein, 10 aa, Homo sapiens
HIFWEPDASK

SEQ ID NO: 21591 - protein, 18 aa, Homo sapiens
NPDGSESPWCFTTDPNIR

SEQ ID NO: 21592 - protein, 13 aa, Homo sapiens
NDLSGGVLNDWSR

SEQ ID NO: 21593 - protein, 11 aa, Homo sapiens
GGVEEGPTVLR

SEQ ID NO: 21594 - protein, 11 aa, Homo sapiens
TIGIIGAPFSK

SEQ ID NO: 21595 - protein, 9 aa, Homo sapiens
YFSMTEVDR

SEQ ID NO: 21596 - protein, 13 aa, Homo sapiens
IVLGQEQDSYGGK

SEQ ID NO: 21597 - protein, 10 aa, Homo sapiens
QGYFVEAQPK

SEQ ID NO: 21598 - protein, 10 aa, Homo sapiens
VGEYSLYIGR

SEQ ID NO: 21599 - protein, 8 aa, Homo sapiens
IMEVTAER

SEQ ID NO: 21600 - protein, 9 aa, Homo sapiens
LLQVDPEAR

SEQ ID NO: 21601 - protein, 10 aa, Homo sapiens
LSPEQLEEVR

SEQ ID NO: 21602 - protein, 13 aa, Homo sapiens
IAAFNIQTFGETK

SEQ ID NO: 21603 - protein, 9 aa, Homo sapiens
IVVAGMLLR

SEQ ID NO: 21604 - protein, 10 aa, Homo sapiens
YDIALVQEVR

SEQ ID NO: 21605 - protein, 7 aa, Homo sapiens
LFIEWLK

SEQ ID NO: 21606 - protein, 8 aa, Homo sapiens
APNDFNLR

SEQ ID NO: 21607 - protein, 11 aa, Homo sapiens
DYYFALAHTVR

SEQ ID NO: 21608 - protein, 12 aa, Homo sapiens
VLYPNDNFFEGK

SEQ ID NO: 21609 - protein, 17 aa, Homo sapiens
FDGCYCDSLENLADGYK

SEQ ID NO: 21610 - protein, 10 aa, Homo sapiens
NFADIDDSWK

SEQ ID NO: 21611 - protein, 12 aa, Homo sapiens
SILDWTSFNQER

SEQ ID NO: 21612 - protein, 8 aa, Homo sapiens
LDYISLHR

SEQ ID NO: 21613 - protein, 9 aa, Homo sapiens
SPLSWGLLR

SEQ ID NO: 21614 - protein, 11 aa, Homo sapiens
THWLLELVTTR

SEQ ID NO: 21615 - protein, 9 aa, Homo sapiens
GHALLIDCR

SEQ ID NO: 21616 - protein, 11 aa, Homo sapiens
LAVLITNSNVR

SEQ ID NO: 21617 - protein, 10 aa, Homo sapiens
LQFPLPTAQR

SEQ ID NO: 21618 - protein, 18 aa, Homo sapiens
AMAIADALGKIPQTVLWR

SEQ ID NO: 21619 - protein, 14 aa, Homo sapiens
WLPQNDLLGHPMTR

SEQ ID NO: 21620 - protein, 8 aa, Homo sapiens
IPQTVLWR

SEQ ID NO: 21621 - protein, 8 aa, Homo sapiens
TYPVPFQR

SEQ ID NO: 21622 - protein, 10 aa, Homo sapiens
AMAIADALGK

SEQ ID NO: 21623 - protein, 5 aa, Homo sapiens
ENIMR

SEQ ID NO: 21624 - protein, 5 aa, Homo sapiens
SDFVK

SEQ ID NO: 21625 - protein, 12 aa, Homo sapiens
QKGEYLPLLQGK

SEQ ID NO: 21626 - protein, 12 aa, Homo sapiens
VLSSMADAVLAR

SEQ ID NO: 21627 - protein, 11 aa, Homo sapiens
FGMHLQAATPK

SEQ ID NO: 21628 - protein, 10 aa, Homo sapiens
SLVFPEAENR

SEQ ID NO: 21629 - protein, 10 aa, Homo sapiens
GEYLPLLQGK

SEQ ID NO: 21630 - protein, 10 aa, Homo sapiens
GYEPDASVTK

SEQ ID NO: 21631 - protein, 9 aa, Homo sapiens
ILLNNAAFR

SEQ ID NO: 21632 - protein, 9 aa, Homo sapiens
QSDLDTLAK

SEQ ID NO: 21633 - protein, 8 aa, Homo sapiens
NFTGEEIK

SEQ ID NO: 21634 - protein, 8 aa, Homo sapiens
SLGMIFEK

SEQ ID NO: 21635 - protein, 8 aa, Homo sapiens
GRDLLTLK

SEQ ID NO: 21636 - protein, 7 aa, Homo sapiens
LAEQYAK

SEQ ID NO: 21637 - protein, 6 aa, Homo sapiens
DLLTLK

SEQ ID NO: 21638 - RNA, 656 nt, synthetic construct
  misc_feature 1..656: note = source = /note="Description of Artificial Sequence: Synthetic transcript sequence"
  source 1..656: mol_type = other RNA
gggaaataagagagaaaagaagagtaagaagaaatataagagccaccatgaaaacgcagcgaaatggacccagcctcggtcgctggtcattggtgcttctgcttctgggtctggtgatgcctctcgctatcgtagcgcaagtcttgtcgtatcaagaggcggtccttagggccattgatggaatcaaccagagatcgtcggatgcaaatctctaccggcttctcgatttggacccgaggccaactatggacggggacccggatacgccgaaacccgtgtcctttacggtaaaagaaacagtgtgccctcgcacaacccagaagtcccccgaagattgtgacttcaaagaggatgggttggtcaagcgatgcgtcggaaccgtgattttgaatcaggccagggactcgttcgacatcagctgtgacaaagacaaccggagatcagcgagacttggaaacttctttcggaaggtgaaagagaagatcggtggcgggctgaagaaggtcggacagaagattaaggactttctcgggaacctcgtaccccgcactgcatcataatgagctgccttctgcggggcttgccttctggccatgcccttcttctctcccttgcacctgtacctcttggtctttgaataaagcctgagtaggaag

SEQ ID NO: 21639 - RNA, 749 nt, synthetic construct
  misc_feature 1..749: note = source = /note="Description of Artificial Sequence: Synthetic transcript sequence"
  source 1..749: mol_type = other RNA
gggaaataagagagaaaagaagagtaagaagaaatataagagccaccatggctttcacagagcattcccctttgacgccgcatcggagggatctgtgctcccgctcaatctggttggcccggaagattaggagcgacctgaccgcgctgacagagtcgtatgtcaaacaccagggccttaacaagaatatcaatcttgactcagccgatggtatgccagtcgcttcgacggatcagtggtcggagctcacagaggcagaacgactgcaagagaacctccaagcgtatcgaacttttcacgtacttcttgcgagattgttggaggaccagcaagtgcatttcactcccaccgaaggggacttccaccaggcaattcacacgctcctccttcaagtggcggcgtttgcgtaccagatcgaggagctgatgatcctcctcgaatacaaaattccccggaacgaagccgacggtatgccgatcaatgtgggagatggaggattgtttgaaaagaaactctggggattgaaggtactgcaagaactttcccagtggacggtcagatcaattcacgatttgaggttcatctcgagccatcagaccgggatccccgcacgcgggtcgcactacatcgccaacaataagaaaatgtgataataggctgccttctgcggggcttgccttctggccatgcccttcttctctcccttgcacctgtacctcttggtctttgaataaagcctgagtaggaag

SEQ ID NO: 21640 - RNA, 533 nt, synthetic construct
  misc_feature 1..533: note = source = /note="Description of Artificial Sequence: Synthetic transcript sequence"
  source 1..533: mol_type = other RNA
gggaaataagagagaaaagaagagtaagaagaaatataagagccaccatgaaaacacttcaattcttcttcctcttttgttgctggaaggctatctgctgcaattcgtgcgaactgacaaacatcaccattgcgattgaaaaggaagagtgtcgattctgtatttccatcaacactacatggtgtgccgggtactgttatacgcgggatttggtctacaaagacccggccagaccaaagatccagaaaacgtgcacctttaaggagctggtgtacgagacagtccgcgtacccggttgtgcgcaccacgcggacagcctctatacgtaccctgtggcaacccagtgccattgtggaaagtgcgactcggattcgacggattgcactgtgaggggcttggggccctcatattgctcatttggagagatgaaagagtgataagctgccttctgcggggcttgccttctggccatgcccttcttctctcccttgcacctgtacctcttggtctttgaataaagcctgagtaggaag

SEQ ID NO: 21641 - RNA, 896 nt, synthetic construct
  misc_feature 1..896: note = source = /note="Description of Artificial Sequence: Synthetic transcript sequence"
  source 1..896: mol_type = other RNA
gggaaataagagagaaaagaagagtaagaagaaatataagagccaccatggcggacaatttctccctccacgacgcactgtcgggctcgggaaatccgaatccgcaagggtggcctggagcgtggggaaaccagccggcaggggctggagggtatcccggagcgtcgtacccaggcgcctacccaggccaggcccctcccggtgcgtacccgggtcaggctcctcccggagcttatccgggagcacccggagcctaccccggtgctcctgcccctggtgtgtatcctggtcccccgagcgggcctggtgcgtatccctcaagcggacagccctccgcgaccggtgcataccccgcgactggaccctacggtgcgccagccggaccgctgatcgtaccctataacctgccattgccagggggtgtggtcccgcgaatgcttattacgatcctcggcacagtcaagccaaatgccaaccggatcgcgcttgattttcagcgggggaacgatgtcgcgttccactttaatccgaggttcaacgaaaacaataggcgcgtaatcgtgtgcaacacgaaattggacaataactggggaagagaggaacgccaatcagtctttccgttcgaatcggggaagccttttaagatccaagtgctggtagagccggatcatttcaaagtcgccgtcaatgacgcgcaccttctccagtacaaccatagagtgaaaaagttgaacgagatttcaaaattggggatctcgggtgacattgatcttacatccgcgtcatacacgatgatttgaagcgctgccttctgcggggcttgccttctggccatgcccttcttctctcccttgcacctgtacctcttggtctttgaataaagcctgagtaggaag

SEQ ID NO: 21642 - RNA, 1385 nt, synthetic construct
  misc_feature 1..1385: note = source = /note="Description of Artificial Sequence: Synthetic transcript sequence"
  source 1..1385: mol_type = other RNA
gggaaataagagagaaaagaagagtaagaagaaatataagagccaccatgaagatgcacttgcagcgcgccttggtcgtgttggcacttctcaacttcgcgacggtgtccctttcgcttagcacatgcactacgcttgacttcgggcacatcaagaagaagagggtagaggccattcgcggtcaaatcctctcgaaacttcgcctcacgtcgccgcctgagccgactgtaatgactcacgtcccctatcaagtactcgcgctctataactcaactagagagttgcttgaagaaatgcacggggagagggaggaaggttgtacacaagaaaataccgagagcgagtactatgccaaggaaatccacaagttcgacatgattcagggtttggcggagcataatgagttggctgtctgcccaaaaggtatcacatcgaaggtgtttaggttcaatgtctcgtccgtcgaaaagaatcgaaccaatctcttccgggcagaatttcgcgtgttgagagtgccgaatccttcgtcgaaacggaacgaacagagaatcgagctgtttcagatcctcagacccgatgagcacattgcgaaacagagatacatcggcgggaagaaccttccgacccggggaacggcggagtggctgagctttgatgtgacggatactgtgagagaatggctgcttcgccgcgagtcgaatctgggattggagatcagcattcactgcccctgccacacattccagcccaacggcgacatcttggagaatatccacgaggtcatggagatcaagttcaaaggggtagacaacgaagatgatcatggacgaggagacttgggacggctgaaaaagcagaaagaccatcacaacccacatctgattctcatgatgatccctccccatagactggacaatcccgggcagggaggtcagaggaagaagagagcattggacacgaactactgctttcggaatctcgaagaaaactgttgtgtcaggcccctgtacattgattttaggcaggatctcgggtggaagtgggtgcatgaaccgaaggggtactatgcaaacttctgcagcgggccatgtccttatctccggtcagccgatacaacccattccacagtgcttggactctacaatacgctgaacccagaagcgtccgcgtcaccgtgttgtgtccctcaagacttggagcccttgacgattctctactatgtgggacgaacaccgaaagtagagcagctgtccaacatggtcgtaaaatcatgcaaatgctcatgataataggctgccttctgcggggcttgccttctggccatgcccttcttctctcccttgcacctgtacctcttggtctttgaataaagcctgagtaggaag

SEQ ID NO: 21643 - protein, 11 aa, Homo sapiens
CMGTVTLNQAR

SEQ ID NO: 21644 - protein, 9 aa, Homo sapiens
FALLGDFFR

SEQ ID NO: 21645 - protein, 12 aa, Homo sapiens
TTQQSPEDCDFK

SEQ ID NO: 21646 - protein, 11 aa, Homo sapiens
CVGTVILNQAR

SEQ ID NO: 21647 - protein, 8 aa, Homo sapiens
SSDANLYR

SEQ ID NO: 21648 - protein, 9 aa, Homo sapiens
LQENLQAYR

SEQ ID NO: 21649 - protein, 8 aa, Homo sapiens
TFHVLLAR

SEQ ID NO: 21650 - protein, 11 aa, Homo sapiens
VLQELSQWTVR

SEQ ID NO: 21651 - protein, 11 aa, Homo sapiens
CDSDSTDCTVR

SEQ ID NO: 21652 - protein, 8 aa, Homo sapiens
ELVYETVR

SEQ ID NO: 21653 - protein, 24 aa, Homo sapiens
VPGCAHHADSLYTYPVATQCHCGK

SEQ ID NO: 21654 - protein, 13 aa, Homo sapiens
SFSLSTNLQESLR

SEQ ID NO: 21655 - protein, 9 aa, Homo sapiens
TLMLLAQMR

SEQ ID NO: 21656 - protein, 10 aa, Homo sapiens
YSPCAWEVVR

SEQ ID NO: 21657 - protein, 8 aa, Homo sapiens
LLWQLNGR

SEQ ID NO: 21658 - protein, 8 aa, Homo sapiens
LMSSLHLK

SEQ ID NO: 21659 - protein, 11 aa, Homo sapiens
GNDVAFHFNPR

SEQ ID NO: 21660 - protein, 11 aa, Homo sapiens
IQVLVEPDHFK

SEQ ID NO: 21661 - protein, 15 aa, Homo sapiens
MLITILGTVKPNANR

SEQ ID NO: 21662 - protein, 13 aa, Homo sapiens
LINEIEEMGGMAK

SEQ ID NO: 21663 - protein, 14 aa, Homo sapiens
NTQIIIQEESGIPK

SEQ ID NO: 21664 - protein, 15 aa, Homo sapiens
TGLQAGLTIDEFAPR

SEQ ID NO: 21665 - protein, 9 aa, Homo sapiens
ALDTNYCFR

SEQ ID NO: 21666 - protein, 15 aa, Homo sapiens
GYYANFCSGPCPYLR

SEQ ID NO: 21667 - protein, 10 aa, Homo sapiens
VEQLSNMVVK

SEQ ID NO: 21668 - protein, 11 aa, Homo sapiens
EAEQSNVALQR

SEQ ID NO: 21669 - protein, 14 aa, Homo sapiens
IAYLEAENLEMHDR

SEQ ID NO: 21670 - protein, 10 aa, Homo sapiens
SEVQYIQEAR

SEQ ID NO: 21671 - RNA, 779 nt, synthetic construct; identical to SEQ ID NO: 1643
  misc_feature 1..779: note = source = /note="Description of Artificial Sequence: Synthetic transcript sequence"
  source 1..779: mol_type = other RNA

SEQ ID NO: 21672 - RNA, 1215 nt, synthetic construct
  misc_feature 1..1215: note = source = /note="Description of Artificial Sequence: Synthetic transcript sequence"
  source 1..1215: mol_type = other RNA
gggaaataagagagaaaagaagagtaagaagaaatataagagccaccatgaatggaacggaagggccaaacttttatgtgcctttcagcaacgccacgggtgtagtgagatcgccgtttgagtacccccagtattatctggccgagccttggcagttctcgatgctcgccgcctacatgttcctgcttattgtactggggtttccgatcaactttttgaccttgtatgtaacggtgcaacacaagaagttgaggacaccgcttaactatatcctgcttaatctcgccgtcgcggatctgttcatggtgctcggagggtttacctccacactgtatacgtccctccacgggtacttcgtgtttggtcccactgggtgcaacttggaaggattctttgcaacactgggaggggaaattgcgttgtggagcttggtggtgttggcgattgagagatacgtggtcgtatgcaaaccaatgtcaaactttcggtttggagagaaccatgcgattatgggagtcgcgtttacgtgggtcatggccttggcctgcgcagctcctcctctcgcgggctggtcccgctatatccccgagggacttcagtgctcatgcggcatcgactactataccttgaagcccgaggtgaataatgagtcgttcgtaatctacatgtttgtcgtgcatttcacaattcccatgatcattatcttcttctgttacggacagcttgtgttcactgtaaaagaggcagcagcgcagcagcaggaaagcgcgacaacccaaaaggccgagaaagaggtgacgcggatggtcatcatcatggtaatcgcgtttcttatctgttgggtgccctacgcctcggtggcattctacatctttacgcaccagggctcgaactttggaccgatcttcatgactattccagcgttcttcgccaaatcggcagctatctacaatcccgtcatctacattatgatgaacaagcagttccgaaattgtatgctcaccacgatttgctgtgggaagaatcccttgggagatgacgaagcgagcgcgacagtctcaaaaaccgaaacttcacaagtcgcaccggcgtgaagcgctgccttctgcggggcttgccttctggccatgcccttcttctctcccttgcacctgtacctcttggtctttgaataaagcctgagtaggaaggcggccgctcgagcatgcatctaga

SEQ ID NO: 21673 - RNA, 1871 nt, synthetic construct
  misc_feature 1..1871: note = source = /note="Description of Artificial Sequence: Synthetic transcript sequence"
  source 1..1871: mol_type = other RNA
gggaaataagagagaaaagaagagtaagaagaaatataagagccaccatgctgggagtactggtgctcggggccttggcgcttgcgggacttgggttcccggcaccggctgagccccagccgggaggttcacagtgtgtagaacacgactgctttgcgctctaccctggacccgctacatttctgaatgcgtcgcagatctgtgacggactccgcggtcatcttatgacggtgagatcgtccgtagcggcggatgtcatttcgcttttgctcaacggggacggaggtgtgggcaggaggcgcctttggatcgggctccagttgccgcctgggtgcggtgatcccaagcggttggggcctctgaggggatttcaatgggtaacgggtgacaacaacacatcctattcccggtgggccagactcgacttgaatggtgcccctctttgcggacccctctgcgtggcggtgtcggcagcagaggcaacggtcccgagcgagccgatttgggaagagcagcagtgtgaagtcaaagcggacgggttcctttgcgagttccacttccccgcgacgtgcagacccttggcagtagagcccggagcggcagcagccgcggtatccatcacttacgggacgccgttcgctgcgagaggagcagacttccaagctcttcccgtcggctcgtcggcagcggtggccccattgggactgcaactgatgtgcactgcaccgccaggggcggtccagggacactgggcacgcgaggcaccgggagcgtgggactgttccgtcgaaaacggcggatgcgagcatgcatgtaacgcaatccccggagcgcctcgctgccagtgcccagctggagcggcgctgcaagcggatgggcggtcgtgtacggcctcagccactcagagctgcaacgatctgtgcgagcatttctgcgtcccgaatccggaccagcctgggtcgtatagctgtatgtgtgaaacaggatatcggttggcagcagaccagcacagatgcgaggatgtcgatgattgtattctggaaccctcgccttgtccgcagcgatgcgtcaatacgcagggtggtttcgagtgtcactgttatccaaactacgatcttgtggacggagaatgtgtcgagccggtcgatccctgctttcgagctaactgtgagtaccagtgtcaacccctgaatcagacaagctacctctgtgtgtgcgccgaaggatttgctcccatcccgcacgaaccccatcggtgtcagatgttttgtaaccaaacggcctgccctgccgattgcgatccgaatacacaggcttcatgtgagtgcccagagggatatatcttggatgatggttttatctgcactgacattgacgaatgtgaaaatggtgggttttgctcgggtgtgtgccacaatctccccggtaccttcgaatgcatctgtggtcccgactcggctctggcacgccatatcgggacagattgtgatagcgggaaggtcgacggtggggactccggctccggagagcctccgccctcacccacgccagggagcaccttgaccccaccggcggtggggttggtgcactcgggattgttgatcgggatctcaattgcctcgctctgccttgtggtggcgcttttggccttgctgtgccatctccgcaagaagcaaggtgcagctcgcgcgaaaatggaatacaagtgtgccgcaccgagcaaagaggtcgtcctccagcacgtaagaacagaaaggactcctcagcgactctgataagctgccttctgcggggcttgccttctggccatgcccttcttctctcccttgcacctgtacctcttggtctttgaataaagcctgagtaggaag

SEQ ID NO: 21674 - RNA, 1991 nt, synthetic construct
  misc_feature 1..1991: note = source = /note="Description of Artificial Sequence: Synthetic transcript sequence"
  source 1..1991: mol_type = other RNA
gggaaataagagagaaaagaagagtaagaagaaatataagagccaccatgagagccttgcttttgctgggattcctgctcgtgtcccttgaaagcacactgagcatcccgccatgggaggcgcctaaggagcacaagtacaaggcggaagagcatacagtggtacttacagtcacgggagaaccgtgtcacttccccttccagtaccataggcagctctatcataagtgcacccacaaaggtcggccaggtcctcagccgtggtgcgcgacaactccgaacttcgaccaggatcagcgctggggatactgcctggaacccaaaaaggtcaaagaccactgctccaaacacagcccctgccaaaagggcggaacgtgtgtcaacatgccatccggtccgcactgtttgtgtccacagcatctgacggggaatcattgccagaaagaaaagtgttttgagcctcagttgttgagattcttccacaaaaacgaaatttggtaccgcacagaacaggctgccgtagccagatgtcagtgcaagggaccggacgcacattgccagcgcctcgcgagccaggcgtgtcggacgaatccttgtctgcatggcggaaggtgtctggaggtggaggggcaccgcctctgccattgccctgtcggctacacaggggccttttgcgacgtcgataccaaggcgtcgtgctatgacggcaggggactgtcctaccgcgggttggcccgcactacgttgtcgggtgcgccctgtcaaccgtgggcctcggaagcgacgtatcgaaacgtgacggccgagcaagccagaaattggggactcggagggcatgctttttgtagaaaccccgacaatgatatcaggccatggtgctttgtcctcaacagggatagactgtcgtgggaatactgcgacctggctcagtgtcaaactcccacgcaagccgcaccacccacacccgtgtcacccagactgcacgtaccgcttatgcctgcccagccggcacctcccaaacctcaaccaactacgcggacaccgccgcagtcgcagacccctggagcgcttccggcgaaacgggaacagccgccttccctcaccaggaatgggcccttgagctgtggtcagaggctgcgcaaatcactttcgtcgatgaccagagtcgtaggagggctcgtagcattgcgaggtgctcacccctacattgcagcgctctattggggacattccttttgtgctggttcgcttattgcgccctgctgggtgctgacggccgcacactgtctgcaagataggccggcacccgaggatttgacggtggtgctggggcaggagcggcggaaccactcgtgcgaaccctgccagacactggcggtccggtcatataggcttcacgaggctttctcaccggtatcataccagcatgaccttgcgttgcttcgccttcaagaagatgcggacggatcgtgcgcactccttagcccatatgtacagccggtgtgtctcccgtccggagcggccagaccctcagagacaacgctttgccaggtggcagggtggggacatcagtttgaaggtgcggaagagtacgcatcgtttttgcaagaagcgcaagtgccgttcctctcacttgagagatgctcagcgcctgacgtgcacggcagctcgatccttcccggaatgttgtgtgccgggttcttggagggtggaactgacgcctgccagggagatagcggaggtccgttggtgtgcgaggaccaagcagcggagaggaggctcacactccagggaatcatcagctggggatcgggatgtggagatagaaataagcccggtgtatatacggatgtcgcctattacctcgcgtggatcagagagcacacagtgtcctgataagctgccttctgcggggcttgccttctggccatgcccttcttctctcccttgcacctgtacctcttggtctttgaataaagcctgagtaggaag

SEQ ID NO: 21675 - RNA, 704 nt, synthetic construct
  misc_feature 1..704: note = source = /note="Description of Artificial Sequence: Synthetic transcript sequence"
  source 1..704: mol_type = other RNA
gggaaataagagagaaaagaagagtaagaagaaatataagagccaccatgcctcgcttgttcttcttccatctgttgggagtctgcctcctcttgaatcagttcagcagggcggtcgccgactcatggatggaggaggtgatcaaactctgcggtagggaactcgtaagagcgcagatcgccatttgcgggatgtccacatggtcgaagagatcgctttcacaagaggatgcaccccaaacgcctcgccccgtcgccgagattgtcccgtcgtttatcaataaggacacggagactatcaacatgatgtcagaatttgtggcgaaccttccgcaagaactgaagcttacgctgagcgagatgcagcccgcactgccgcagctccagcagcacgtgccagtgttgaaagattcgtcgttgctctttgaggagttcaagaaattgattcgaaaccgccagtccgaagcggctgactcctcacccagcgaacttaagtatctgggacttgatacccattcgagaaagaaacggcagttgtactcggcgctcgcgaataagtgttgtcacgtagggtgcacaaaacggtccctggcacggttttgttgataataggctgccttctgcggggcttgccttctggccatgcccttcttctctcccttgcacctgtacctcttggtctttgaataaagcctgagtaggaag

SEQ ID NO: 21676 - RNA, 776 nt, synthetic construct
  misc_feature 1..776: note = source = /note="Description of Artificial Sequence: Synthetic transcript sequence"
  source 1..776: mol_type = other RNA
gggaaataagagagaaaagaagagtaagaagaaatataagagccaccatggactcagacgagacagggtttgaacattcagggctctgggtgtccgtattggcagggctcttgcttggtgcgtgccaagcccaccccattccagattcgtcgcccctgttgcagttcggaggacaggtccggcagcggtatctctatactgatgatgcgcagcagacggaagcgcaccttgagattagggaggatggcacggtaggtggagcggcagaccagtcgcccgagagcctcttgcagcttaaagctctgaaacccggcgtgatccaaatccttggggtcaagacctcccgcttcctctgccagcgcccagacggtgctctgtacggatccttgcactttgacccggaagcgtgttcctttcgagaactgcttttggaagatggttacaacgtctaccagtcagaggcccacggacttccgctccatctgcccgggaataagagccctcatagggaccctgcgcccagaggaccggccagattcctcccgctgcctgggcttccgccagccctccccgagcctcccggaatcttggcacctcaaccgcccgatgtgggttcgtcggacccgctgtcgatggtgggacccagccaggggcggagcccgtcgtatgcgtcatgataataggctgccttctgcggggcttgccttctggccatgcccttcttctctcccttgcacctgtacctcttggtctttgaataaagcctgagtaggaag

SEQ ID NO: 21677 - RNA, 1483 nt, synthetic construct
  misc_feature 1..1483: note = source = /note="Description of Artificial Sequence: Synthetic transcript sequence"
  source 1..1483: mol_type = other RNA
gggaaataagagagaaaagaagagtaagaagaaatataagagccaccatgcccctcaacgttagcttcaccaacaggaactatgacctcgactacgactcggtgcagccgtatttctactgcgacgaggaggagaacttctaccagcagcagcagcagagcgagctgcagcccccggcgcccagcgaggatatctggaagaaattcgagctgctgcccaccccgcccctgtcccctagccgccgctccgggctctgctcgccctcctacgttgcggtcacacccttctcccttcggggagacaacgacggcggtggcgggagcttctccacggccgaccagctggagatggtgaccgagctgctgggaggagacatggtgaaccagagtttcatctgcgacccggacgacgagaccttcatcaaaaacatcatcatccaggactgtatgtggagcggcttctcggccgccgccaagctcgtctcagagaagctggcctcctaccaggctgcgcgcaaagacagcggcagcccgaaccccgcccgcggccacagcgtctgctccacctccagcttgtacctgcaggatctgagcgccgccgcctcagagtgcatcgacccctcggtggtcttcccctaccctctcaacgacagcagctcgcccaagtcctgcgcctcgcaagactccagcgccttctctccgtcctcggattctctgctctcctcgacggagtcctccccgcagggcagccccgagcccctggtgctccatgaggagacaccgcccaccaccagcagcgactctgaggaggaacaagaagatgaggaagaaatcgatgttgtttctgtggaaaagaggcaggctcctggcaaaaggtcagagtctggatcaccttctgctggaggccacagcaaacctcctcacagcccactggtcctcaagaggtgccacgtctccacacatcagcacaactacgcagcgcctccctccactcggaaggactatcctgctgccaagagggtcaagttggacagtgtcagagtcctgagacagatcagcaacaaccgaaaatgcaccagccccaggtcctcggacaccgaggagaatgtcaagaggcgaacacacaacgtcttggagcgccagaggaggaacgagctaaaacggagcttttttgccctgcgtgaccagatcccggagttggaaaacaatgaaaaggcccccaaggtagttatccttaaaaaagccacagcatacatcctgtccgtccaagcagagactcaaaagctcatttctgaaattgacttgttgcggaaacaaaatgaacagttgaaacacaaacttgaacagctacggaactcttgtgcgtgataataggctggagcctcggtggccatgcttcttgccccttgggcctccccccagcccctcctccccttcctgcacccgtacccccgtggtctttgaataaagtctgagtgggcggc

SEQ ID NO: 21678 - RNA, 2564 nt, synthetic construct
  misc_feature 1..2564: note = source = /note="Description of Artificial Sequence: Synthetic transcript sequence"
  source 1..2564: mol_type = other RNA
gggaaataagagagaaaagaagagtaagaagaaatataagagccaccatgtcgtcatcctcatggctcttgctgtcattggtggccgtcacagcggcacaaagcacgatcgaagaacaggctaagacgtttctcgacaaattcaaccacgaagccgaagatctcttctaccagtccagcctcgcgagctggaactacaacaccaacatcactgaagaaaatgtgcagaacatgaataacgctggagacaaatggtccgcctttctcaaagaacaatcgacgctcgcacagatgtacccgcttcaagaaattcagaaccttacagtgaaactccagcttcaggcactccagcagaatgggtcatcggtattgtcagaggacaagtcaaaacgcttgaacacgattttgaatacgatgtcgacaatctactcgacgggaaaggtgtgtaatcctgataatcctcaagagtgtctcctgcttgaacccgggcttaacgagatcatggccaatagccttgactacaacgagcgactgtgggcatgggagtcatggcgctcagaagtcgggaagcagctgcgccccttgtacgaggaatatgtcgtgctgaaaaacgaaatggcccgagccaaccattacgaggactacggcgattattggaggggtgattacgaggtcaatggggtcgacgggtatgactacagccgaggtcagttgatcgaagatgtggagcacaccttcgaggagatcaaacccctgtacgagcacctccatgcgtatgtcagggcgaaattgatgaatgcctatccgagctacatctcgccaatcggttgcctgccagcgcaccttcttggggatatgtggggtcgattctggactaatctctattcgttgacggtcccgtttggacaaaagcccaatatcgacgtaacggatgccatggtagaccaagcgtgggatgcgcagaggatctttaaggaagcggagaaattcttcgtatccgtcgggctgcccaacatgacacagggattttgggagaactccatgctcactgatcccggcaatgtccaaaaggcagtctgccaccctaccgcttgggaccttggaaagggagattttcggattctgatgtgtacaaaagtgacaatggacgatttcctgacagctcaccatgaaatgggacacatccagtatgacatggcctacgcagcgcagccgtttttgcttcgcaacggtgcgaatgaggggtttcacgaggccgtgggagagattatgtcgctctccgctgcgacacccaagcatttgaagtccatcggactgctgtcacccgactttcaagaggacaacgaaacggaaatcaatttcctgctcaagcaagcgcttactatcgtaggcacactccccttcacctatatgcttgaaaagtggaggtggatggtgttcaagggcgagatccctaaagatcagtggatgaagaaatggtgggagatgaagagagagatcgtgggtgtcgtcgagccggtgccccatgatgagacttattgtgacccggcgtcactcttccacgtgtccaacgattatagctttatccggtactatactagaacgttgtaccagttccaattccaagaggccctctgccaggcggcgaagcacgagggacccctgcataagtgcgacatctcaaattccaccgaagccggtcagaagcttttcaatatgttgcgcttgggaaagtcggaaccttggactctggctctcgaaaatgtggtaggagcgaagaatatgaacgtcagacccctgctgaactattttgagcccctttttacgtggctgaaggaccagaacaaaaactcattcgtcggctggtcaacggattggagcccctacgcagatcagagcattaaggtccgaatctcgttgaagtcggctctcggtgacaaggcgtacgagtggaatgacaatgagatgtatctcttccgctcgtccgtggcgtatgcgatgaggcagtacttcctcaaagtaaagaaccagatgattttgttcggggaggaggatgtccgggtagccaatcttaaacctcggatctcgtttaacttctttgtcacggcgcctaaaaacgtgtcggacatcattccgcggaccgaagtagagaaagcgatcagaatgagccggtcgaggattaatgacgcgttcaggctgaacgacaacagcttggaatttctcgggattcaaccgacgcttgggcctccgaaccagccacccgtatccatttggttgattgtgttcggagtagtgatgggtgtgatcgtggtcggcattgtcatcttgatcttcaccgggattagagatcggaagaagaagaacaaagcgagatcgggagaaaacccgtatgcctcgattgacatctcgaaaggagagaataacccagggtttcagaatactgatgacgtgcagacatcattttgataataggctgccttctgcggggcttgccttctggccatgcccttcttctctcccttgcacctgtacctcttggtctttgaataaagcctgagtaggaag

SEQ ID NO: 21679 - RNA, 3455 nt, synthetic construct
  misc_feature 1..3455: note = source = /note="Description of Artificial Sequence: Synthetic transcript sequence"
  source 1..3455: mol_type = other RNA
gggaaataagagagaaaagaagagtaagaagaaatataagagccaccatgttccaactgccggtgaacaatctcgggtcattgcgcaaagcccgcaagactgtcaagaaaatcctgtcagacatcgggctcgagtactgtaaggaacatattgaggatttcaaacaattcgaacctaacgacttctacctcaagaatacgacttgggaggacgtagggctgtgggatccctcactcacaaagaatcaggattaccgcacaaagccattttgctgttcagcctgcccattttcgagcaaattcttttcagcgtacaagtcacactttaggaacgtccactccgaagattttgagaatcgcattctccttaactgcccttattgcacgtttaacgcagacaagaaaactctcgaaacacacattaagatcttccacgcgccgaatgcctcagcgcctagctcgtccctctcaacctttaaagacaagaataagaacgacggtttgaagccgaaacaggcagactcggtcgagcaggcagtctactactgtaagaagtgcacgtatcgggacccgctgtatgaaatcgtgcggaagcatatctaccgcgagcactttcaacacgtggcagcgccctatattgcgaaggcgggagaaaagagcctgaacggagccgtgccgctcggatcaaacgccagggaggagagcagcatccactgcaaaagatgtttgttcatgcccaaatcgtatgaggcactcgtgcagcatgtaatcgaggaccacgagaggattgggtaccaagtcactgcgatgatcggacataccaacgtcgtggtgcctagaagcaaacctttgatgctcatcgcgccgaagccccaagataagaagtcaatgggattgcctccccgaattggcagcctcgcatcggggaatgtcagatcattgccctcacagcagatggtgaatcggctctcaatcccgaagcctaacttgaacagcactggagtcaacatgatgtcctcggtacacttgcagcaaaacaattacggagtgaagagcgtgggacaaggttactcggtgggacagtcgatgcgccttgggctgggagggaacgcaccggtatccattccccagcaatcacagtcagtgaagcagcttctcccatcaggtaacggtagatcatatggacttggtagcgaacagagatcacaggcacccgcacgatattcgcttcagagcgctaatgcctcatccctctcgtcgggacagttgaagtccccatcgttgtcacagtcacaggcgagcagggtattgggtcaatcgtcctcgaaaccggccgcggcggcgacggggccaccgcctggtaacacgtccagcacacagaaatggaagatttgcaccatttgcaatgagctttttcccgagaatgtctactcagtgcacttcgaaaaagaacacaaggccgaaaaggtaccggccgtggcaaactatatcatgaagatccataacttcacgtcaaagtgtctctactgcaaccggtacctccccacggataccctcttgaatcatatgctcatccacgggctttcctgtccctattgccgctcaacgttcaacgacgtagagaagatggccgctcatatgcgcatggtacacattgatgaggagatgggtcctaagacagattcgacgctgtccttcgacttgactttgcagcagggatcgcatacaaacattcatctgctcgtcaccacttacaacttgcgggatgctccggccgagagcgtggcgtaccacgcgcagaataaccctcctgtcccgcccaagccgcagcctaaagtccaagagaaggcggacattcctgtcaaatcgtcgccccaggcggcagtgccgtacaagaaagacgtgggaaaaacattgtgtccgctgtgtttctcaatccttaagggaccgatctccgatgcactggcccaccacttgagagaaaggcatcaagtaatccagacagtccatcccgtggagaagaagttgacgtataagtgcatccattgcttgggagtgtatacctcgaacatgacggcgtcgacgatcacactgcatcttgtgcactgcagaggcgtcggtaaaacacagaacggacaggacaaaactaacgcgccctcacgcctcaaccagagcccctcgctggcacctgtcaagaggacatatgagcaaatggaatttcctcttttgaagaagagaaaattggatgatgattcggactcgcccagcttctttgaagaaaagccggaagagccggtggtcttggcgcttgacccgaaggggcacgaagatgacagctacgaggcgaggaaatcatttctcaccaaatacttcaacaaacaaccatatccgacgaggagagagattgaaaaactggctgccagcctctggctttggaagagcgacatcgcgagccacttctccaataagcgaaagaaatgtgtgcgggactgtgagaagtataagcccggagtactgctggggttcaatatgaaggagcttaacaaagtaaagcatgagatggatttcgatgcggaatggctttttgagaaccacgatgaaaaagattcgcgcgtgaatgcttcgaaaacagcagacaaaaagcttaatcttgggaaagaagatgattcctcatccgactcgtttgaaaacttggaagaggaatcgaacgaaagcgggagcccctttgaccccgtgtttgaagtcgagcccaagatctcaaatgataatcccgaggaacatgtattgaaggtgattcccgaggacgcctcggagtcagaggagaagctcgatcagaaggaggacggctccaaatacgaaacgatccaccttacggaggagccgacgaaactgatgcacaacgcctccgattccgaggtcgaccaggatgacgtcgtcgagtggaaggacggtgccagccccagcgagtcaggaccaggatcacaacaggtgtcggattttgaagataacacgtgtgagatgaagcccggaacgtggtcagatgaatcctcgcagtccgaagatgcgcggtcaagcaaaccggcagcaaagaagaaggccactatgcagggagatagagagcaacttaagtggaaaaacagctcatatggaaaggtggaagggttctggtccaaggatcagtcgcagtggaagaacgcatcagagaatgacgagcggttgtcgaatccccaaattgagtggcagaattccacgatcgactcggaggacggggaacagttcgacaatatgacggatggagtggcggaacctatgcatgggtcgctggccggagtcaaactttcatcccagcaggcgtgataataggctgccttctgcggggcttgccttctggccatgcccttcttctctcccttgcacctgtacctcttggtctttgaataaagcctgagtaggaag

SEQ ID NO: 21680 - RNA, 1600 nt, synthetic construct
  misc_feature 1..1600: note = source = /note="Description of Artificial Sequence: Synthetic transcript sequence"
  source 1..1600: mol_type = other RNA
gggaaataagagagaaaagaagagtaagaagaaatataagagccaccatggaccgttcactgggatggcaagggaattctgtccctgaggacaggactgaagctgggatcaagcgtttcctggaggacaccacggatgatggagaactgagcaagttcgtgaaggatttctcaggaaatgcgagctgccacccaccagaggctaagacctgggcatccaggccccaagtcccggagccaaggccccaggccccggacctctatgatgatgacctggagttcagacccccctcgcggccccagtcctctgacaaccagcagtacttctgtgccccagcccctctcagcccatctgccaggccccgcagcccatggggcaagcttgatccctatgattcctctgaggatgacaaggagtatgtgggctttgcaaccctccccaaccaagtccaccgaaagtccgtgaagaaaggctttgactttaccctcatggtggcaggagagtctggcctgggcaaatccacacttgtcaatagcctcttcctcactgatctgtaccgggaccggaaacttcttggtgctgaagagaggatcatgcaaactgtggagatcactaagcatgcagtggacatagaagagaagggtgtgaggctgcggctcaccattgtggacacaccaggttttggggatgcagtcaacaacacagagtgctggaagcctgtggcagaatacattgatcagcagtttgagcagtatttccgagacgagagtggcctgaaccgaaagaacatccaagacaacagggtgcactgctgcctgtacttcatctcacccttcggccatgggctccggccattggatgttgaattcatgaaggccctgcatcagcgggtcaacatcgtgcctatcctggctaaggcagacacactgacacctcccgaagtggaccacaagaaacgcaaaatccgggaggagattgagcattttggaatcaagatctatcaattcccagactgtgactctgatgaggatgaggacttcaaattgcaggaccaagccctaaaggaaagcatcccatttgcagtaattggcagcaacactgtagtagaggccagagggcggcgagttcggggtcgactctacccctggggcatcgtggaagtggaaaacccagggcactgcgactttgtgaagctgaggacaatgctggtacgtacccacatgcaggacctgaaggatgtgacacgggagacacattatgagaactaccgggcacagtgcatccagagcatgacccgcctggtggtgaaggaacggaatcgcaacaaactgactcgggaaagtggtaccgacttccccatccctgctgtcccaccagggacagatccagaaactgagaagcttatccgagagaaagatgaggagctgcggcggatgcaggagatgctacacaaaatacaaaaacagatgaaggagaactattgataataggctggagcctcggtggccatgcttcttgccccttgggcctccccccagcccctcctccccttcctgcacccgtacccccgtggtctttgaataaagtctgagtgggcggc

SEQ ID NO: 21681 - RNA, 1354 nt, synthetic construct
  misc_feature 1..1354: note = source = /note="Description of Artificial Sequence: Synthetic transcript sequence"
  source 1..1354: mol_type = other RNA
gggaaataagagagaaaagaagagtaagaagaaatataagagccaccatggtggccggtacccgctgcctcctcgcgctgcttttgccccaagtgttgctgggtggcgcagccggactcgtcccagagcttggacgaaggaagtttgcagcagcctcgtcaggtagaccctcttcgcaaccttcggatgaggtgctgagcgaatttgaattgcggctgctctccatgtttggactgaagcagcgtccgactccatcgcgcgacgcggtggtgccaccttacatgcttgacctctaccgcagacacagcggacaacctggcagccctgcacccgatcaccggctggagagagcagcaagcagggcaaatactgtccggtcgtttcatcatgaagagagccttgaagaactgccagaaacctccggaaagaccacgagacggtttttcttcaatctttcttcgattccaaccgaagaattcataactagcgcagaacttcaagtttttcgcgagcagatgcaagatgcacttggaaacaactcctcattccatcatcgaatcaacatatacgaaatcatcaagccggcaaccgccaactcaaagttcccggtgactcgtctgcttgatacgcgcctggtcaaccaaaacgcttcccgctgggaatcattcgatgtcaccccagccgttatgagatggactgctcaaggacacgcaaaccatgggtttgtggtggaagtggcccatcttgaagaaaagcagggggtgagcaagcgtcacgtgagaatttcgagatccctgcatcaggatgaacattcatggtcgcaaattcggccactcctggtcacttttggccacgatggtaaaggacaccctctgcataagagggagaaaagacaggcgaagcataaacagaggaagagactgaagtccagctgcaagcgacatcccctttacgtggacttctcggacgtggggtggaatgactggattgtggcacctcctggctaccacgccttttactgtcatggagaatgtccctttccactggcggatcacctcaattccaccaatcatgcaattgtgcaaacccttgtgaactcagtcaattccaaaatccctaaggcttgttgtgtccctactgagctctccgcaatttcgatgctctaccttgatgagaacgagaaagtcgtgctgaaaaactatcaggacatggtcgtggagggttgtggttgccggtgataataggctggagcctcggtggccatgcttcttgccccttgggcctccccccagcccctcctccccttcctgcacccgtacccccgtggtctttgaataaagtctgagtgggcggc

SEQ ID NO: 21682 - RNA, 736 nt, synthetic construct
  misc_feature 1..736: note = source = /note="Description of Artificial Sequence: Synthetic transcript sequence"
  source 1..736: mol_type = other RNA
gggaaataagagagaaaagaagagtaagaagaaatataagagccaccatggcggcgggcgagcttgagggtggcaaacccctgagcgggctgctgaatgcgctggcccaggacactttccacgggtaccccggcatcacagaggagctgctacggagccagctatatccagaggtgccacccgaggagttccgcccctttctggcaaagatgagggggattcttaagtctattgcgtctgcagacatggatttcaaccagctggaggcattcttgactgctcaaaccaaaaagcaaggtgggatcacatctgaccaagctgctgtcatttccaaattctggaagagccacaagacaaaaatccgtgagagcctcatgaaccagagccgctggaatagcgggcttcggggcctgagctggagagttgatggcaagtctcagtcaaggcactcagctcaaatacacacacctgttgccattatagagctggaattaggcaaatatggacaggaatctgaatttctgtgtttggaatttgatgaggtcaaagtcaaccaaattctgaagacgctgtcagaggtagaagaaagtatcagcacactgatcagccagcctaactgataataggctggagcctcggtggccatgcttcttgccccttgggcctccccccagcccctcctccccttcctgcacccgtacccccgtggtctttgaataaagtctgagtgggcggc

SEQ ID NO: 21683 - RNA, 883 nt, synthetic construct
  misc_feature 1..883: note = source = /note="Description of Artificial Sequence: Synthetic transcript sequence"
  source 1..883: mol_type = other RNA
gggaaataagagagaaaagaagagtaagaagaaatataagagccaccatggcggctctgaagagttggctgtcgcgcagcgtaacttcattcttcaggtacagacagtgtttgtgtgttcctgttgtggctaactttaagaagcggtgtttctcagaattgataagaccatggcacaaaactgtgacgattggctttggagtaaccctgtgtgcggttcctattgcacagaaatcagagcctcattcccttagtagtgaagcattgatgaggagagcagtgtctttggtaacagatagcacctctacctttctctctcagaccacatatgcgttgattgaagctattactgaatatactaaggctgtttataccttaacttctctttaccgacaatatacaagtttacttgggaaaatgaattcagaggaggaagatgaagtgtggcaggtgatcataggagccagagctgagatgacttcaaaacaccaagagtacttgaagctggaaaccacttggatgactgcagttggtctttcagagatggcagcagaagctgcatatcaaactggcgcagatcaggcctctataaccgccaggaatcacattcagctggtgaaactgcaggtggaagaggtgcaccagctctcccggaaagcagaaaccaagctggcagaagcacagatagaagagctccgtcagaaaacacaggaggaaggggaggagcgggctgagtcggagcaggaggcctacctgcgtgaggattgataataggctggagcctcggtggccatgcttcttgccccttgggcctccccccagcccctcctccccttcctgcacccgtacccccgtggtctttgaataaagtctgagtgggcggc

SEQ ID NO: 21684 - RNA, 2342 nt, synthetic construct
  misc_feature 1..2342: note = source = /note="Description of Artificial Sequence: Synthetic transcript sequence"
  source 1..2342: mol_type = other RNA
gggaaataagagagaaaagaagagtaagaagaaatataagagccaccatgagcgagacttcgcggacggcctttggtggacggagggccgtgcctccgaacaattcaaatgcagccgaggacgatctgccgacggtcgaattgcagggcgtcgtaccacgcggagtgaatctccaagagttccttaacgtgacctcggtacatctgtttaaggagcggtgggacacgaataaggtggatcatcacaccgacaaatatgaaaacaacaagctcatcgtcagacgcgggcagagcttttatgtccagattgacttctcgcgaccttacgatcccagacgagacttgttccgggtggagtatgtgatcgggaggtatccgcaagagaacaagggaacttacatcccggtccccattgtatcggagcttcagtccgggaagtggggtgcaaagatcgtaatgcgcgaggaccggtcggtgcggttgtccattcagtccagcccaaaatgcatcgtcgggaaatttcggatgtacgtagcggtgtggactccctatggtgtgcttagaacaagccggaaccccgaaactgatacgtacattctctttaacccgtggtgcgaggatgacgcggtctatctggacaacgagaaggagcgcgaggagtacgtgctcaatgacatcggagtgattttctacggagaggtgaatgacatcaagacgcggtcgtggtcgtatgggcagtttgaagatgggattctcgacacctgtctctatgtcatggatagggcgcagatggacctgtcgggaaggggaaaccccatcaaagtctcgcgagtgggtagcgcgatggtaaacgcgaaggacgatgaaggggtcctcgtcggatcatgggacaacatctacgcttacggcgtgccaccgtcggcctggaccgggagcgtcgacatcctgctggaataccggtcaagcgagaacccggtgcgctacgggcagtgttgggtctttgctggtgtctttaacactttccttcgctgtctcgggattcccgcgagaattgtcacgaactacttttcggcacatgataatgatgcgaatcttcaaatggacatctttttggaggaggacggtaatgtcaattcaaaattgacgaaggactccgtgtggaattatcactgttggaatgaggcctggatgactcggcctgatctcccggtgggcttcggtggttggcaggctgtagactcaacaccccaagaaaactccgatggtatgtacagatgcgggcctgcgtcagtgcaggcgattaagcatggacacgtatgcttccagttcgatgcaccctttgtctttgcggaagtgaatagcgaccttatctacatcacagccaaaaaggacgggactcatgtagtggagaacgtcgatgccacacatattggaaagttgattgtaacgaagcagatcggcggtgatggaatgatggacattactgacacatacaagttccaggaggggcaggaagaagaacgccttgcattggaaacggcgttgatgtatggggcgaagaaaccccttaacacagaaggagtgatgaagtcgagaagcaatgtggacatggatttcgaggtggagaatgcagtgctgggaaaagatttcaagttgtcaatcacctttcgcaacaattcccacaatcgatatacaatcacagcatatctctcggccaatatcacattctacacgggcgtgcctaaagcggagttcaagaaagaaacgtttgacgtgacgctcgaacctttgtcgttcaaaaaggaggcagtactcattcaggcgggagagtacatgggccagcttcttgagcaagcgagcctccacttcttcgtaactgcacgcatcaacgaaacccgcgacgtactcgcaaaacagaaatcgacggtgttgacgatccccgaaatcatcatcaaagtgagaggtacacaagtcgtaggctcagatatgaccgtgacagtccagttcactaatcccttgaaagagacactgcggaacgtctgggtccaccttgatggacccggggtcacaaggcccatgaagaaaatgttcagagaaatccgacctaactcgacggtgcaatgggaggaggtatgcaggccgtgggtatccggacaccgaaagctgattgcctcgatgtcgagcgattccctgcggcacgtatacggggagctcgacgtgcagatccagaggcgcccatcaatgtgataagctgccttctgcggggcttgccttctggccatgcccttcttctctcccttgcacctgtacctcttggtctttgaataaagcctgagtaggaag

SEQ ID NO: 21685 - RNA, 1952 nt, synthetic construct
  misc_feature 1..1952: note = source = /note="Description of Artificial Sequence: Synthetic transcript sequence"
  source 1..1952: mol_type = other RNA
gggaaataagagagaaaagaagagtaagaagaaatataagagccaccatggaacttggacacccactcattctttcagtgacgtcgggagtctacagccaggtacagttgcagcaaagcggtgcagagctggcacgcacgggtgcctccgtcaaactgagctgcaaagcatccggatacaccttcacgtcgtattggatgcagtgggtaaagcaaaggcccggtcagggccttgaatggatcggtgcaatctaccccggtgacggtgacaccagatatacgcagaagttcaaggggaaagcgactctcaccgcagacaagagctcctcgaccgcttatatgcaactgtcctcactcgcaagcgaggattcagcagtgtactattgtgaacgagaaaggggagattactggggccagggaacgtcagtcacagtgtcctcgggatcggcgtcggcgccaacactttttccgttggtgagctgcgaaaactcgccgtcagatacgagctcagtcgcagtaggttgtttggcccaagacttccttccggacagcattacgttctcatggaaatacaagaataacagcgacatctcatcgacaaggggattcccgtcggtgctgcgcggtggcaaatacgcggcaaccagccaggtgcttctcccttccaaggatgtaatgcagggtactgacgagcacgtcgtctgtaaggtgcagcatcctaacggaaacaaagaaaagaatgtgccgcttcccgtcatcgcggaacttccccctaaggtatcggtgtttgtgcccccaagggacggattctttggcaaccctcgcaagtcaaaattgatttgccaggctacagggttttcccctcgacagatccaggtgtcgtggctccgagagggaaaacaagtgggatcgggagtcacaacggatcaggtccaggcggaggcgaaagagtcgggacctacgacatacaaggtgacatccactctgactattaaggaaagcgattggctctcacagtcgatgtttacatgtcgggtcgaccatcgcgggctgacctttcagcagaatgcttcatcgatgtgcgtgccggatcaagataccgcgattcgcgtattcgccatcccaccctccttcgccagcatcttcctcacgaaatccacgaagttgacatgtcttgtcaccgatctgacaacgtatgattcggtgacgatttcgtggacgcggcagaatggcgaggctgtgaaaacccatacaaacatcagcgagagccacccgaacgcgaccttttccgcggtcggggaagcctcaatttgcgaagatgattggaacagcggagagcgattcacatgtaccgtcactcacacggatctgccctcgcctttgaagcagactatcagccgccctaaaggggtcgcgcttcatagacccgacgtgtatctcctgcctcctgccagagagcagctgaatttgcgagaatcggcgacgattacctgtctcgtgactggcttttcgccagccgatgtattcgtccaatggatgcaaagagggcagcccttgtcgcccgagaagtatgtaacctcagcgccgatgcccgaaccgcaggcccctgggcggtacttcgctcactcgattttgacggtgtcggaagaggagtggaatacgggggagacttacacttgcgtcgtcgcgcacgaggcactcccgaatcgggtgactgagcgcacagtggacaagtcaaccgggaaacctacgttgtataatgtcagcctcgtcatgtcagataccgccggaacgtgctatcccaccttgtacaacgtatcagtggtgatggctgaggtagacggcacttgctactgaagcgctgccttctgcggggcttgccttctggccatgcccttcttctctcccttgcacctgtacctcttggtctttgaataaagcctgagtaggaag

SEQ ID NO: 21686 - RNA, 635 nt, synthetic construct
  misc_feature 1..635: note = source = /note="Description of Artificial Sequence: Synthetic transcript sequence"
  source 1..635: mol_type = other RNA
gggaaataagagagaaaagaagagtaagaagaaatataagagccaccatgagatcgtcaccgggaaacatggagcggattgtcatttgtttgatggtgattttcctcggtactcttgtacacaaatcgtcatcccagggacaggacaggcacatgatcagaatgcggcagctgatcgacatcgtagatcagttgaaaaactacgtgaatgatctggtccccgagttccttccagcgcccgaggacgtggaaacaaactgcgagtggtcagcattttcgtgctttcaaaaggcccagcttaagtccgcgaatacgggcaacaacgaaaggatcattaatgtctccatcaagaagttgaagagaaaaccgccttcaaccaatgctgggaggcgccaaaaacatcggctcacatgcccctcgtgtgacagctatgagaagaagcctccgaaggaatttctcgagcgcttcaaatcgttgctccagaaaatgatccaccagcatctgagctcgcgaacgcacgggagcgaagattcctgataataggctgccttctgcggggcttgccttctggccatgcccttcttctctcccttgcacctgtacctcttggtctttgaataaagcctgagtaggaag

SEQ ID NO: 21687 - RNA, 1748 nt, synthetic construct
  misc_feature 1..1748: note = source = /note="Description of Artificial Sequence: Synthetic transcript sequence"
  source 1..1748: mol_type = other RNA
gggaaataagagagaaaagaagagtaagaagaaatataagagccaccatggcgacggcgcttatggccgtcgtccttcgagcggcagcggtggcgcccagactcaggggtagaggagggacgggaggagctagacggctgtcgtgtggagccagacggcgagcggcgagaggaacgtcacccggacgccgcctttcgacggcgtggtcccagcctcagccgcctccagaggaatatgctggggccgatgacgtatcccagagcccggtagccgaggagccgtcgtgggtccccagcccgaggcctccggtgccccacgagtcaccggaaccacccagcggtcgctcgctcgtccaacgggatattcaggcgtttctgaaccagtgcggagcatcgccgggagaagcgaggcactggctgacccagttccaaacctgtcatcactccgctgacaaaccctttgcagtcattgaagtagacgaggaagtgctcaagtgccagcaaggggtgtcgtccttggcgttcgcgctcgcgttccttcagaggatggacatgaaaccccttgtggtgcttggcctccctgcccctactgccccttcgggatgtctgtccttttgggaagcgaaagcgcaactggccaaatcgtgtaaggtcttggtcgacgcattgagacataatgccgcagcagccgtgccgttctttggaggcggttccgtccttagagctgcggagccagcgccccacgcctcgtatggcggaattgtctccgtggagacagatttgcttcagtggtgcctcgagtcaggtagcatccccattctttgccccatcggagaaactgcagcaaggcgcagcgtgttgcttgacagcctcgaggtaacagcctccctcgcaaaagctttgaggcccaccaagatcatctttcttaacaacacgggaggattgcgagattcgagccataaggtactttcaaatgtgaatttgccggcagatctggacctcgtatgcaatgccgagtgggtgtccacaaaggaacgccagcagatgaggctgattgtggatgtgctttcgagactcccgcaccactcatcagcggtaatcactgcagcgagcactctgctgacggagctgttcagcaataagggctcagggacgctcttcaagaacgcggaaagaatgcttcgggtccggagcctggacaaattggatcaggggcgacttgtcgatctcgtcaacgcgtcatttgggaaaaagctgcgggacgactatctggcgtcgttgcgaccacgcctccactcgatctacgtgtcggagggttacaacgcagccgcaatcttgacaatggaaccagtcttgggagggacaccgtacctcgataagttcgtggtgtcgtcgtcacggcagggccagggtagcggtcaaatgctctgggagtgtctgaggcgggacttgcagaccctcttttggcgctcccgcgtgacaaatcccatcaatccttggtactttaagcattcggatgggtcgttctcgaacaaacagtggattttcttttggttcggacttgcggacatccgagactcatacgagttggtaaaccatgcgaaggggttgcccgattcgttccacaagcccgcatcagaccccgggtcatgataagctgccttctgcggggcttgccttctggccatgcccttcttctctcccttgcacctgtacctcttggtctttgaataaagcctgagtaggaag

SEQ ID NO: 21688 - RNA, 1657 nt, synthetic construct
  misc_feature 1..1657: note = source = /note="Description of Artificial Sequence: Synthetic transcript sequence"
  source 1..1657: mol_type = other RNA
gggaaataagagagaaaagaagagtaagaagaaatataagagccaccatgacttttaacagttttgaaggatctaaaacttgtgtacctgcagacatcaataaggaagaagaatttgtagaagagtttaatagattaaaaacttttgctaattttccaagtggtagtcctgtttcagcatcaacactggcacgagcagggtttctttatactggtgaaggagataccgtgcggtgctttagttgtcatgcagctgtagatagatggcaatatggagactcagcagttggaagacacaggaaagtatccccaaattgcagatttatcaacggcttttatcttgaaaatagtgccacgcagtctacaaattctggtatccagaatggtcagtacaaagttgaaaactatctgggaagcagagatcattttgccttagacaggccatctgagacacatgcagactatcttttgagaactgggcaggttgtagatatatcagacaccatatacccgaggaaccctgccatgtatagtgaagaagctagattaaagtcctttcagaactggccagactatgctcacctaaccccaagagagttagcaagtgctggactctactacacaggtattggtgaccaagtgcagtgcttttgttgtggtggaaaactgaaaaattgggaaccttgtgatcgtgcctggtcagaacacaggcgacactttcctaattgcttctttgttttgggccggaatcttaatattcgaagtgaatctgatgctgtgagttctgataggaatttcccaaattcaacaaatcttccaagaaatccatccatggcagattatgaagcacggatctttacttttgggacatggatatactcagttaacaaggagcagcttgcaagagctggattttatgctttaggtgaaggtgataaagtaaagtgctttcactgtggaggagggctaactgattggaagcccagtgaagacccttgggaacaacatgctaaatggtatccagggtgcaaatatctgttagaacagaagggacaagaatatataaacaatattcatttaactcattcacttgaggagtgtctggtaagaactactgagaaaacaccatcactaactagaagaattgatgataccatcttccaaaatcctatggtacaagaagctatacgaatggggttcagtttcaaggacattaagaaaataatggaggaaaaaattcagatatctgggagcaactataaatcacttgaggttctggttgcagatctagtgaatgctcagaaagacagtatgcaagatgagtcaagtcagacttcattacagaaagagattagtactgaagagcagctaaggcgcctgcaagaggagaagctttgcaaaatctgtatggatagaaatattgctatcgtttttgttccttgtggacatctagtcacttgtaaacaatgtgctgaagcagttgacaagtgtcccatgtgctacacagtcattactttcaagcaaaaaatttttatgtcttgataataggctggagcctcggtggccatgcttcttgccccttgggcctccccccagcccctcctccccttcctgcacccgtacccccgtggtctttgaataaagtctgagtgggcggc

SEQ ID NO: 21689 - protein, 11 aa, Homo sapiens
ISFNFFVTAPK

SEQ ID NO: 21690 - protein, 8 aa, Homo sapiens
LWAWESWR

SEQ ID NO: 21691 - protein, 15 aa, Homo sapiens
SEPWTLALENVVGAK

SEQ ID NO: 21692 - protein, 10 aa, Homo sapiens
NVHSEDFENR

SEQ ID NO: 21693 - protein, 21 aa, Homo sapiens
ESGTDFPIPAVPPGTDPETEK

SEQ ID NO: 21694 - protein, 13 aa, Homo sapiens
FLEDTTDDGELSK

SEQ ID NO: 21695 - protein, 8 aa, Homo sapiens
HAVDIEEK

SEQ ID NO: 21696 - protein, 13 aa, Homo sapiens
NYQDMVVEGCGCR

SEQ ID NO: 21697 - protein, 17 aa, Homo sapiens
SFHHEESLEELPETSGK

SEQ ID NO: 21698 - protein, 12 aa, Homo sapiens
WESFDVTPAVMR

SEQ ID NO: 21699 - protein, 12 aa, Homo sapiens
ALYLQYTDETFR

SEQ ID NO: 21700 - protein, 14 aa, Homo sapiens
DIASGLIGPLIICK

SEQ ID NO: 21701 - protein, 13 aa, Homo sapiens
GAYPLSIEPIGVR

SEQ ID NO: 21702 - protein, 8 aa, Homo sapiens
ESLMNQSR

SEQ ID NO: 21703 - protein, 18 aa, Homo sapiens
HSAQIHTPVAIIELELGK

SEQ ID NO: 21704 - protein, 6 aa, Homo sapiens
WNSGLR

SEQ ID NO: 21705 - protein, 10 aa, Homo sapiens
AVYTLTSLYR

SEQ ID NO: 21706 - protein, 10 aa, Homo sapiens
LAEAQIEELR

SEQ ID NO: 21707 - protein, 7 aa, Homo sapiens
NHIQLVK

SEQ ID NO: 21708 - protein, 13 aa, Homo sapiens
MYVAVWTPYGVLR

SEQ ID NO: 21709 - protein, 12 aa, Homo sapiens
STVLTIPEIIIK

SEQ ID NO: 21710 - protein, 7 aa, Homo sapiens
VEYVIGR

SEQ ID NO: 21711 - protein, 16 aa, Homo sapiens
DTHFPIBIFBBGBBHR

SEQ ID NO: 21712 - protein, 8 aa, Homo sapiens
TSTSPIVK

SEQ ID NO: 21713 - protein, 7 aa, Homo sapiens
WIYDTSK

SEQ ID NO: 21714 - protein, 8 aa, Homo sapiens
WKIDGSER

SEQ ID NO: 21715 - protein, 7 aa, Homo sapiens
IINVSIK

SEQ ID NO: 21716 - protein, 11 aa, Homo sapiens
LTBPSBDSYEK

SEQ ID NO: 21717 - protein, 10 aa, Homo sapiens
QLIDIVDQLK

SEQ ID NO: 21718 - protein, 8 aa, Homo sapiens
DLQTLFWR

SEQ ID NO: 21719 - protein, 10 aa, Homo sapiens
DSYELVNHAK

SEQ ID NO: 21720 - protein, 17 aa, Homo sapiens
HNAAAAVPFFGGGSVLR

SEQ ID NO: 21721 - protein, 13 aa, Homo sapiens
AGFLYTGEGDTVR

SEQ ID NO: 21722 - protein, 18 aa, Homo sapiens
DHFALDRPSETHADYLLR

SEQ ID NO: 21723 - protein, 13 aa, Homo sapiens
IFTFGTWIYSVNK

SEQ ID NO: 21724 - RNA, 311 nt, synthetic construct; identical to SEQ ID NO: 1644
  misc_feature 1..311: note = source = /note="Description of Artificial Sequence: Synthetic transcript sequence"
  source 1..311: mol_type = other RNA

SEQ ID NO: 21725 - RNA, 494 nt, synthetic construct; identical to SEQ ID NO: 1647
  misc_feature 1..494: note = source = /note="Description of Artificial Sequence: Synthetic transcript sequence"
  source 1..494: mol_type = other RNA

SEQ ID NO: 21726 - RNA, 299 nt, synthetic construct
  misc_feature 1..299: note = source = /note="Description of Artificial Sequence: Synthetic transcript sequence"
  source 1..299: mol_type = other RNA
gggaaataagagagaaaagaagagtaagaagaaatataagagccaccatggccggacccgcgacgcagtcaccgatgaagctcatggctcttcagttgctcctctggcactcggcgctgtggacagtgcaagaggcaaaacttctcctgctgaagctccttctgttgaaattgttgcttctcaagttgcttttgctgaaataatgagctgccttctgcggggcttgccttctggccatgcccttcttctctcccttgcacctgtacctcttggtctttgaataaagcctgagtaggaag

SEQ ID NO: 21727 - RNA, 1613 nt, synthetic construct
  misc_feature 1..1613: note = source = /note="Description of Artificial Sequence: Synthetic transcript sequence"
  source 1..1613: mol_type = other RNA
gggaaataagagagaaaagaagagtaagaagaaatataagagccaccatggcccctgtcgcggtgtgggcggctcttgcggtaggcctcgaactctgggcggcagctcacgccctgccagcccaagtcgccttcacgccttacgcgccagaacccgggtcaacttgtcgccttagggagtattatgaccaaacggctcagatgtgttgcagcaaatgctcgccagggcagcacgcaaaagtgttttgtactaagacgtccgatacggtatgtgattcatgtgaggactccacctacactcagctttggaattgggtgcccgagtgcctgtcatgcgggtcgcgctgctcgtcggatcaggtagaaactcaagcgtgcactcgagaacagaacagaatttgtacgtgcaggcccggttggtactgcgccttgtcgaagcaggaaggctgcaggctttgtgcgccgcttcgcaagtgtaggcctggatttggagtcgcgaggccgggaaccgagacatccgacgtagtctgtaagccctgtgctccgggaacgttctccaacacaacttcgagcacggacatctgtcggccccaccagatttgcaatgtagtggcaatccccgggaacgcgtcaatggacgccgtctgtacgtccacctcgcccactagatccatggcaccgggagcagtgcatttgccgcagcccgtgtcgacgcgatcacagcacacacagcccacaccagagccttcgacagcgccgtcgacatcattcttgctgccgatggggccgtcgccgcctgccgagggctcaactggtgatgagccgaaaagctgcgacaaaacgcatacatgtccgccctgccccgctcccgaactcctcggtgggcctagcgtgtttctgttcccaccaaaaccgaaagataccttgatgatctcacggacccctgaagtgacgtgcgtggtcgtcgatgtctcgcatgaggaccccgaggtgaagtttaactggtacgtcgacggagtggaagtgcacaatgccaagaccaagcccagagaggaacagtacaactccacttacagagtcgtgtcggtactcactgtcttgcatcaggattggctgaacggaaaggagtataagtgcaaagtatcgaacaaagcgctgccagcgccgatcgagaaaacaatcagcaaagcgaagggacagcctcgcgaacctcaagtgtatacgttgccgccctcacgagaggaaatgacgaagaatcaggtcagcctcacgtgcttggtgaaaggcttctatccgagcgatattgccgtggagtgggagtccaatggtcagccagagaacaattacaagacgacaccgcctgtcttggattcggacgggagctttttcttgtactcgaaactcacggtagacaagagcagatggcaacaggggaatgtattctcgtgttcagtgatgcacgaggcgctccacaaccattatacacaaaagtcgctctcgttgtcaccgggaaagtgataagctgccttctgcggggcttgccttctggccatgcccttcttctctcccttgcacctgtacctcttggtctttgaataaagcctgagtaggaag

SEQ ID NO: 21728 - RNA, 2228 nt, synthetic construct
  misc_feature 1..2228: note = source = /note="Description of Artificial Sequence: Synthetic transcript sequence"
  source 1..2228: mol_type = other RNA
gggaaataagagagaaaagaagagtaagaagaaatataagagccaccatgacgtttgggcaatcgaaactgtataggtccgaagattacgggaagaatttcaaagatattacggatttgatcaataacaccttcatcagaactgagttcggtatggccatcggtccagaaaattcgggaaaagtggtcctcacagcagaggtgtcaggaggctcgcgcggagggcggatttttcgctcatcggactttgccaagaacttcgtgcagactgacctcccatttcacccgctcacacaaatgatgtattcaccgcagaactcagactacctcctggcgttgtcaacggagaatggcctttgggtatccaagaattttggagggaagtgggaggaaattcataaagccgtgtgccttgcgaagtggggtagcgacaataccatcttctttacaacgtatgctaacggctcatgtacggatcttggtgcgcttgaattgtggagaacttcggatctcggaaagtcgttcaaaacgattggtgtgaaaatctacagctttgggctgggaggaaggttcctctttgcttccgtgatggcagacaaagacacgactaggaggattcacgtgtcaaccgaccagggagacacgtggtcaatggcacaactgccgagcgtaggccaggagcagttctattcaatccttgcggcgaacgatgatatggtctttatgcacgtcgatgagccaggtgatacagggtttggaactatctttacatcagatgatcgagggatcgtgtattcaaaatcgctcgaccgacatctctacaccacaactggtggtgagactgatttcacgaacgtcacctcactgcgcggagtgtatatcacatccgtgcttagcgaggacaattccatccagaccatgatcacgtttgaccaaggaggaagatggacacatttgagaaaacccgagaacagcgaatgcgacgccactgctaagaacaaaaacgagtgctcgttgcacatccacgcttcctattcgatttcacaaaagctgaatgtacctatggcacctctctcggagcctaacgcagtagggatcgtaatcgctcatggttcggtgggagatgccatctcagtaatggtccccgatgtctatatctcggatgacgggggatactcatggacaaaaatgcttgagggaccccattactatactattttggactcagggggcatcattgtagccatcgaacactcatcgaggcccattaacgtaatcaagttctcaacagacgaaggacaatgctggcaaacgtatacttttacgcgagatccaatctacttcacggggctggcctccgagccaggagcccggtcgatgaatatctcaatctggggcttcaccgagtcgttccttacgtcccagtgggtgtcatatacaatcgacttcaaagacatccttgaacgcaattgtgaggaaaaggactacacaatttggctggcacattcgaccgaccccgaggactacgaggacggctgtattctggggtacaaagagcagttccttcgcttgcggaagtcaagcgtatgtcagaacgggcgagattacgtcgtaacgaagcagccttcaatctgtctgtgttcgcttgaggactttctttgcgacttcggttactacagacccgaaaatgactcgaagtgtgtcgagcagcctgaactcaaggggcatgacttggaattttgcttgtacgggagagaggaacaccttactacaaatgggtacagaaagatccccggagacaagtgccagggtggggtaaaccccgtgagggaggtcaaggacctcaaaaagaaatgcacctcaaactttctctcgccggaaaagcagaatagcaagtccaatagcgtccctatcatcctcgccattgtcggtcttatgttggtgactgtagtggcaggtgtgctgattgtcaaaaagtatgtgtgcggagggaggttcttggtgcatcggtatagcgtgttgcagcaacacgcggaagctaacggagtcgatggtgtggatgccctggatacagcgtcgcacacaaacaagagcggctaccacgacgacagcgacgaggatctccttgagtgaagcgctgccttctgcggggcttgccttctggccatgcccttcttctctcccttgcacctgtacctcttggtctttgaataaagcctgagtaggaag

SEQ ID NO: 21729 - RNA, 857 nt, synthetic construct
  misc_feature 1..857: note = source = /note="Description of Artificial Sequence: Synthetic transcript sequence"
  source 1..857: mol_type = other RNA
gggaaataagagagaaaagaagagtaagaagaaatataagagccaccatggacttccaggtacaaatctttagcttcctgctgatctccgcgagcgttatcatcagccgtggccaaattgtgctgacccagtcccctgcgattatgagcgcaagcccgggtgaaaaagtgacgatgacgtgtagcgcgtcgagcagcgtcacctctatgcactggtttcagcagaagtccggtacttctccgaaacgctggatttacgatacgtcgaaactggctagcggcgtcccggctcgtttcagcggtagcggttccggtaccagctacagcttgaccatcagcattatggaggcggaggacgcggccacctattactgccaacaatggaactataacccaccgatgggtacctttggtggcggcaccaagttggagatcaagcgtgccgacgccgcaccgaccgtttccattttcccgccgagctccgaacagctgaccagcggcggtgcgtctgtggtttgttttctgaataacttctacccgaaagatatcaatgttaagtggaaaattgatggcagcgagcgccaaaatggtgtgctgaacagctggacggaccaggatagcaaagatagcacctatagcatgagcagcacgctgacgctgaccaaggacgagtacgaacgtcacaacagctatacttgcgaggcaacccataaaacctctacgagcccgattgtcaagagctttaatcgcaatgaatgctaaagcgctgccttctgcggggcttgccttctggccatgcccttcttctctcccttgcacctgtacctcttggtctttgaataaagcctgagtaggaag

SEQ ID NO: 21730 - RNA, 1502 nt, synthetic construct; identical to SEQ ID NO: 1663
  misc_feature 1..1502: note = source = /note="Description of Artificial Sequence: Synthetic transcript sequence"
  source 1..1502: mol_type = other RNA

SEQ ID NO: 21731 - RNA, 1712 nt, synthetic construct; identical to SEQ ID NO: 1639
  misc_feature 1..1712: note = source = /note="Description of Artificial Sequence: Synthetic transcript sequence"
  source 1..1712: mol_type = other RNA

SEQ ID NO: 21732 - RNA, 3839 nt, synthetic construct
  misc_feature 1..3839: note = source = /note="Description of Artificial Sequence: Synthetic transcript sequence"
  source 1..3839: mol_type = other RNA
gggaaataagagagaaaagaagagtaagaagaaatataagagccaccatgaggttgttggctaagatcatttgccttatgctgtgggcgatctgtgtcgccgaggactgtaatgagcttccgcctcggaggaatacggaaatcctcacgggtagctggtcggatcagacctatcccgagggaacccaggcgatctacaagtgccgaccggggtatcgatcactcgggaacgtgatcatggtatgccggaagggagaatgggtggcgctgaacccccttcgcaaatgtcagaaaagaccgtgcggccaccccggtgacaccccttttgggacttttacactgactggaggcaatgtctttgagtacggggtcaaggcggtatacacttgtaatgagggatatcaactgctcggagaaatcaactacagggagtgtgatacggacggatggacgaacgacatccccatttgtgaggtcgtgaagtgccttcccgtgaccgcgcctgaaaacggaaaaatcgtatcgagcgcaatggaaccagaccgggaatatcacttcgggcaggccgtacggttcgtatgcaacagcggctataagatcgagggtgacgaagaaatgcattgttcggatgatgggttttggtccaaagaaaaacccaaatgtgtagagatctcgtgcaaatcacctgacgtcatcaacggctcccccattagccagaagatcatctacaaggaaaatgagcgcttccagtacaaatgtaacatgggctacgaatacagcgaacggggtgacgcagtgtgcacagaatcgggatggaggccgctcccttcgtgtgaagaaaaatcatgtgataacccgtacattcccaatggtgattactcgccgcttaggatcaaacacagaaccggtgacgagattacgtatcaatgccgaaacgggttttaccccgccactcgggggaacacggctaagtgcacctccacgggatggattccagcaccgcggtgcacattgaaaccttgtgactaccccgacattaaacacggcggtttgtaccatgagaacatgcgacggccatatttccccgtggcggtcggaaaatactactcatattactgtgatgaacactttgaaaccccgagcggatcgtactgggatcacattcactgtacgcaagacgggtggtccccggcagtgccgtgcctcagaaagtgctatttcccatacttggaaaatgggtacaaccaaaaccacgggagaaaattcgtccagggaaaatcaattgacgtggcgtgtcatcccggatatgccctgcccaaggctcagacgacggtcacgtgtatggagaacggatggagccctactcctcggtgtattagggtgaaaacatgctcgaagtccagcattgatatcgaaaatggctttatctcggaatcgcagtacacctacgctctgaaggagaaagcgaaatatcagtgcaaactcggttatgtgacggcggacggagaaacttcgggatcgattacgtgcggtaaagatggctggtcggcacaacccacatgcatcaagtcgtgtgacatcccggtgttcatgaatgcgcgcacgaagaacgatttcacgtggtttaagttgaacgacacgctcgattatgaatgtcatgacgggtacgagtcaaacaccgggtcaaccactggaagcatcgtatgtgggtacaatgggtggagcgacctccccatttgctatgaaagagagtgcgaacttcccaaaatcgatgtgcatctcgtgccggaccgaaagaaggaccagtataaagtgggagaagtcctcaagtttagctgcaaaccggggttcactatcgtcgggcccaattcagtccagtgctatcactttggactctcacccgatttgccaatttgcaaggaacaagtgcagagctgtggaccacccccagagctgcttaatggcaacgtaaaagagaaaacaaaggaagagtacggacattcggaggtggtggagtattactgcaacccccggtttctgatgaagggacccaacaagatccaatgcgtcgatggagaatggaccactctgcctgtctgtattgtcgaagaatcaacatgcggagacattcccgagttggaacacgggtgggctcagctttcgagccctccttactattatggggattccgtagagttcaattgcagcgagtcattcacaatgatcggccaccgatcaattacttgtatccacggggtctggacacagcttccacagtgtgtcgcaatcgataagctcaagaagtgcaaatcaagcaacctgatcattttggaggagcatctcaagaacaagaaagaatttgatcataattcaaacattaggtatcgctgcagaggaaaagaaggttggattcacactgtatgcatcaacgggcgatgggaccccgaggtgaactgttcgatggcacaaatccagctttgcccgcctccgcctcagattccaaactcccacaatatgaccacaacattgaattatcgggacggagagaaagtatccgtgctgtgccaagagaattatctcatccaagagggtgaggaaatcacgtgtaaggatggccggtggcagtcgatcccgttgtgtgtagaaaagatcccgtgctcgcaaccccctcaaatcgagcacggaacaatcaattcatcgcggtcaagccaagaaagctacgcgcatggaacaaagttgtcctacacgtgtgaaggagggttcagaatcagcgaagaaaacgaaaccacctgttatatggggaagtggtcgtcaccaccccagtgtgaggggctgccatgtaagtcccctcccgagatctcccatggggtcgtcgcgcacatgtcggacagctaccagtacggagaggaggtcacttacaaatgtttcgagggatttggaatcgacggtccagcgatcgccaaatgcttgggagaaaagtggtcccatcccccgagctgtattaagacggactgtctcagcctcccctcgttcgagaatgccattccgatgggggagaagaaagatgtgtacaaggcgggagaacaggtcacatacacatgtgcgacatactataagatggatggggcgagcaacgtcacttgcatcaactcacggtggacaggcagaccgacgtgccgcgatacctcatgtgtcaatcctcctactgtgcagaacgcatacatcgtatcacggcagatgtcgaagtacccctccggtgagagagtgagataccagtgcagaagcccctatgaaatgtttggcgacgaggaagtgatgtgccttaacggtaactggaccgaacctccccagtgtaaagatagcacggggaagtgcggaccgcctcctcccattgacaatggagatattacgtcgtttccactgtcggtgtacgcaccagcttcgtccgtcgagtaccagtgccaaaatctctatcagttggagggaaacaaacggattacgtgtcgcaacggacagtggagcgagccccctaagtgtctccacccctgcgtaattagcagggagattatggaaaactataacattgcgcttcggtggacggctaagcagaaactctacagcagaactggagagagcgtcgagtttgtatgcaagcgaggttataggttgtcatcgaggtcccacacattgaggacgacgtgctgggacggcaaactggagtatcccacgtgcgctaaaaggtaatgagctgccttctgcggggcttgccttctggccatgcccttcttctctcccttgcacctgtacctcttggtctttgaataaagcctgagtaggaag

SEQ ID NO: 21733 - RNA, 578 nt, synthetic construct; identical to SEQ ID NO: 1627
  misc_feature 1..578: note = source = /note="Description of Artificial Sequence: Synthetic transcript sequence"
  source 1..578: mol_type = other RNA

SEQ ID NO: 21734 - RNA, 1793 nt, synthetic construct
  misc_feature 1..1793: note = source = /note="Description of Artificial Sequence: Synthetic transcript sequence"
  source 1..1793: mol_type = other RNA
gggaaataagagagaaaagaagagtaagaagaaatataagagccaccatgcccgcgtcggcaccgccgagaaggccccgacctcctccaccttcacttagcctgctgctggtgctcctcggactgggaggacggaggctgagggccgaacccggagatggggctcaaacgtgggccaggttctcacggccaccggctcccgaggctgccggcttgttccaaggaacgtttccggacgggttcctttgggcggtaggatcggcggcataccagacggagggagggtggcagcagcacggtaaaggggcatcaatttgggacacgttcactcatcacccgctcgctccaccgggtgactccagaaatgcttcgcttccgcttggagcaccctcaccccttcaaccggccactggggatgtcgcgtcagattcgtacaataatgtgtttcgcgataccgaagcccttagagaacttggcgtcacacattaccgattttcaatttcatgggctagggtgttgcctaatgggtcggcgggtgtaccgaatagagaaggtctgaggtattatcgccgccttctcgaacgccttagggagcttggggtccaaccggtggtaacactttatcactgggacctcccacagcggctccaagatgcgtatggagggtgggccaatcgggcgttggccgaccactttagagactacgcggaactttgctttcgccacttcggaggacaggtcaagtattggattaccatcgacaatccttacgtggtagcctggcacggttacgccacggggaggctcgcgcctggtatccgcgggtccccgcgactcggttatcttgtcgcccacaacctcttgttggcccacgccaaagtgtggcatttgtataacacaagcttcaggccgacgcagggcggacaggtgtcaatcgcattgtcgtcgcactggatcaatcccaggcggatgaccgatcattcgattaaggagtgccagaagtcgctggactttgtactgggttggtttgcgaagccagtgtttatcgacggtgactaccctgaatccatgaagaacaatcttagctcgattttgcccgactttacggagtcagagaaaaagtttatcaagggcacggcggacttcttcgcactttgttttgggcccactctttccttccagctcttggacccgcatatgaaattccgccagcttgagtcgcccaatctcagacagctcctgtcgtggatcgatttggagtttaaccacccacaaatctttatcgtggaaaatggatggttcgtgtcgggtacgacaaagcgggatgatgcgaagtatatgtactacttgaagaaattcatcatggagacactgaaagccatcaaacttgacggcgtagatgtcatcggatatacagcgtggtcactcatggatgggtttgaatggcataggggctactcgattagacgcgggctgttttacgtcgactttttgagccaggacaaaatgctgctccccaaaagctccgccttgttctaccagaaacttattgagaaaaacgggttcccgccacttccggaaaatcagcccttggaagggacatttccgtgcgatttcgcgtggggtgtagtagacaattacattcaggtaagccagctgacaaaaccgatttcctcattgacaaagccctaccactgataagctgccttctgcggggcttgccttctggccatgcccttcttctctcccttgcacctgtacctcttggtctttgaataaagcctgagtaggaag

SEQ ID NO: 21735 - RNA, 3851 nt, synthetic construct
  misc_feature 1..3851: note = source = /note="Description of Artificial Sequence: Synthetic transcript sequence"
  source 1..3851: mol_type = other RNA
gggaaataagagagaaaagaagagtaagaagaaatataagagccaccatgcgatcgaggtccaattcgggtgtgcgcctggacggttatgccagactcgtgcagcagacaattctctgctatcaaaatccggtgacggggctcctcagcgcgtcacacgagcagaaagacgcctgggtgcgcgacaatatctacagcattctcgcggtatggggtcttggaatggcgtataggaagaacgccgatagggacgaggataaagccaaagcgtacgagctcgaacagaacgtcgtaaagctgatgcggggcttgctgcaatgcatgatgcgccaagtcgctaaggtcgagaagttcaaacatacgcagagcactaaggactccctgcacgcgaaatacaatacagctacgtgcgggacagtggtgggcgatgaccagtggggacatctccaagtcgacgcaacctcgcttttcttgttgttcctggctcagatgacggcatcgggtttgcgaatcatctttactttggatgaagtcgcgttcatccagaatctcgtattctacattgaagccgcgtataaggtagcggattatggcatgtgggagaggggtgacaagactaaccaaggtatcccggaactcaacgcctcgtcagtcggcatggccaaagcggcgttggaagcgatcgacgagttggatctttttggagctcacggtgggaggaaaagcgtcattcacgtattgcccgatgaagtggagcactgtcaatcgatcttgttctcgatgctccctagggcatcgacatccaaggaaatcgatgcggggttgctgtcgatcattagcttcccggcgttcgcagtcgaggatgtcaacctcgtcaacgtgacaaagaacgagattatcagcaaacttcaagggaggtatgggtgctgccggttccttagggatggttacaagaccccgagagaagatccgaatagacttcactatgacccggcagagctcaaactttttgagaacatcgaatgcgagtggcccgtgttttggacttactttatcatcgatggggtattttcgggtgatgcggtccaagtgcaagagtatcgggaggctctggaaggtattctcatccgcgggaaaaatgggattcgactcgtgcccgagctctatgcggtacctcctaacaaggtggacgaggagtacaagaatcctcacacagtggatagggtccctatgggaaaggtaccccatttgtggggccagtcgctctacattctgtcatcgcttctcgcggaagggttcctggcggctggagaaatcgatcccttgaataggaggttttcaacgagcgtcaagcctgatgtggtcgtccaagtgacggtgctcgccgaaaacaatcatatcaaagaccttctccggaagcacggcgtgaatgtccagtcgattgcggatattcacccaattcaagtgcagcccggaagaatcctgtcgcatatctacgcgaagttggggcggaataagaacatgaacctgtcgggtcgaccgtatcggcatattggagtcctcggtacgtcaaaactttatgtcatccgaaaccagatcttcacgttcactccacagtttacggaccagcatcacttctatcttgcgctggacaacgagatgatcgtggaaatgcttaggattgaactggcgtatttgtgcacttgttggaggatgaccggacgacccaccctcacattcccaatctcccggacgatgttgacaaacgacggatcagacatccattccgccgtgctctcaactatcaggaaactggaggacgggtactttggaggtgctagggtaaaactcggaaatctgtccgagtttctgacgacttcgttttacacttatcttacgttcctcgaccctgactgcgacgaaaagctgtttgataacgcttcagaagggactttctcgcctgattcagactccgatctcgtcggatacttggaggacacatgcaatcaggaaagccaggatgaactggaccactacatcaaccacttgcttcagtcgacctcattgcgctcgtatcttcctcccctgtgcaagaatacggaggaccgccacgtcttttcggcaattcatagcacgcgagacatcctgtcggtgatggcgaaagcgaagggccttgaggtcccatttgtacccatgaccctgccgacaaaagtgttgtcagcccaccggaagtcacttaacttggtggactccccgcagccattgctcgaaaaagtccctgagtcagacttccagtggcccagggacgatcacggtgacgtcgactgtgaaaagctggtggaacagctgaaggactgctcgaatctccaagatcaggcagacatcctttacattctctatgtaatcaaaggtccttcatgggatacgaatttgtcgggtcagcacggggtgaccgtacagaacttgcttggggagctctacgggaaagccggtcttaatcaagaatggggcctgatccggtacatttccggactcttgcggaagaaggtcgaagtgttggctgaagcatgtaccgatctcctctcgcatcagaagcagttgactgtgggactccctcccgagcccagagaaaagattatctcggccccattgccgccagaagaacttacaaaacttatctatgaagccagcgggcaggatatttcgatcgccgtattgacgcaagagattgtggtctatttggcgatgtacgtgagggcgcagccctccttgtttgtcgagatgctccgcttgagaatcggactcattatccaagtaatggcaactgaactcgctcgctccctcaattgcagcggggaggaggcttccgaatcccttatgaacttgagcccgttcgatatgaagaaccttctccatcatatcttgtcagggaaggagtttggggtcgagcgctcagtgaggccgatccacagctcgacctccagccctacgatctcgatccatgaggtagggcacaccggagtcacaaagaccgagaggtccgggatcaatagactgcgatcggagatgaagcagatgacaagacggttcagcgccgatgagcaattcttctcagtaggacaggcggcatcgtcgtcagcacattcgtcaaagtcagcaaggtcctcgactccgtcatcgcctacgggcacaagctcatcggattcgggagggcatcacatcggctggggcgagcgccaggggcaatggttgaggagaaggagactcgatggagccattaaccgggtccccgtcggtttctaccagagagtctggaagatccttcaaaaatgtcacgggctttcgattgacggttacgtccttccctcatccaccacccgcgagatgactccccacgaaatcaaattcgcggtgcatgtcgagtccgtgcttaatagagtcccgcagcccgagtataggcagcttttggtcgaagccattatggtgcttacgttgttgagcgatacggagatgacgagcatcggcgggattattcacgtggatcagatcgtgcagatggcgtcccagctctttctccaagaccaagtcagcatcggtgcgatggatacgctggaaaaggaccaagccacgggcatttgtcactttttctacgattcggcaccgtcgggagcctatggaacaatgacatacctcacgagagcagtagcctcctacttgcaagagctgctgcccaacagcggctgtcagatgcaatgataagctgccttctgcggggcttgccttctggccatgcccttcttctctcccttgcacctgtacctcttggtctttgaataaagcctgagtaggaag

SEQ ID NO: 21736 - RNA, 3425 nt, synthetic construct
  misc_feature 1..3425: note = source = /note="Description of Artificial Sequence: Synthetic transcript sequence"
  source 1..3425: mol_type = other RNA
gggaaataagagagaaaagaagagtaagaagaaatataagagccaccatggcgggtgcggcagggctcacggcggaagtatcgtggaaagtacttgaacggcgagcccgcacaaaaagatccggttccgtgtatgagccattgaaatccattaaccttcctagacccgacaacgaaaccttgtgggataagctcgatcactactatagaatcgtgaagtcgacactcctgctctatcaatcgccgactacagggcttttcccgacgaaaacatgtggaggggaccagaaggcaaaaatccaagattcgctctactgcgcggcaggagcgtgggcactcgccttggcgtatagaagaatcgatgatgataaggggcgcacccacgagcttgaacattccgccatcaagtgcatgaggggcatcctctactgttacatgcgccaggcagacaaggtgcagcagttcaagcaggaccctcgccccacgacgtgtttgcactccgtattcaatgtccacactggggacgaactgctctcgtacgaagagtatggacacctccaaatcaacgctgtatcactgtacttgctgtaccttgtggagatgatttcgagcggactgcagatcatctacaataccgatgaagtatcattcatccagaacctcgtgttttgtgtggagcgggtctacagagtccctgacttcggagtgtgggagaggggatcgaagtacaataatggaagcacagaacttcactcctcctccgtcggtttggcgaaggcggctttggaagcgattaatgggttcaatctcttcggaaaccagggatgctcctggtcggtgatctttgtggacctcgacgcgcataataggaaccggcagacactctgctcactgcttccgcgcgagtcgcggtcgcacaatacggacgcagccctccttccctgcatctcatatccggcgttcgcgttggacgacgaggtcctctttagccagactctcgataaagtagtaagaaagttgaaagggaagtatggttttaagcggtttcttcgggatggatataggacttcgctcgaagatcctaacaggtgttattacaaacccgcggagatcaaactcttcgatgggatcgaatgcgagtttccgatcttctttttgtatatgatgatcgacggagtattccgagggaacccaaaacaggtccaagagtaccaggatcttctcacacccgtactccatcataccacagaggggtacccggtagtccccaaatactattatgtgccggcagatttcgtcgagtatgagaaaaacaatcccggttcacaaaagagatttccctcgaattgcggacgagatgggaaattgtttctttggggtcaggccttgtacattatcgctaagctgctggcggatgaactcatttccccaaaagacattgatccagtgcagagatacgtacccctcaaggaccagcgcaacgtgtcaatgcgcttctcgaaccaaggacctttggaaaatgaccttgtcgtgcatgtcgcgctcattgcggaatcccagcggctccaagtgttcttgaacacttatggtattcagacccaaacgccgcaacaggtcgagcctatccaaatctggccacaacaggaactggtaaaggcttatcttcagctcgggattaatgagaaattggggctgagcggacgccccgatcgccctatcgggtgtctcgggacgtccaagatctaccgcatcttgggcaaaacagtggtgtgctatccgattatctttgacctctcggacttttacatgagccaggatgtatttctgctcatcgacgacatcaaaaacgcgttgcaattcatcaagcaatactggaaaatgcacggacgccctctgttcctcgtgctgatccgcgaggataacatccgcggaagccggttcaatcccatcttggacatgcttgcggctcttaagaaggggatcatcggaggtgtcaaagtccacgtcgacaggctgcagactctgatctcaggcgccgtggtggagcagcttgatttcctccggatctcagacactgaagagctcccagagttcaagtcgttcgaagagctggaaccgccgaaacactcgaaggtgaagaggcagtcgtcgacaccttcagctccggaacttggccaacaaccggacgtgaacatctcagaatggaaggacaagcccacccatgagattcttcaaaaactcaacgattgttcgtgtttggcatcccaggcgatcttgctcggaatcttgctgaagcgggagggtccaaactttatcactaaagagggtacggtatcggatcacattgaacgagtctaccgaagagcggggtcgcagaaactgtggctggcagtgaggtacggcgcagctttcacgcagaaattctccagctcgatcgcaccgcatattacgaccttcttggtacacggaaaacaggtaacgctcggggcattcggccatgaagaggaggtgatcagcaatcccctgtcacctagagtgatccagaacatcatctactataagtgcaatacgcatgatgaacgggaagccgtaatccagcaagagttggtcattcacatcgggtggattatctccaacaaccctgaattgttttcgggaatgttgaagattcgaattggctggattatccacgccatggaatacgagctccagatcagaggcggagataaacccgcacttgatctctatcagctttccccatcagaagtaaaacagcttttgcttgacattcttcagccccagcagaacggtcgctgctggttgaataggaggcaaattgatggctcacttaaccggacgcccacgggtttttacgaccgagtctggcagattttggagcggaccccaaacggaatcatcgtcgccgggaaacatctgccgcagcagcccacgctgagcgatatgacaatgtatgagatgaacttctcgcttctggtggaggacacgttggggaatattgaccagccccagtacagacagattgtagtcgagctcttgatggtcgtgtcgatcgtgctggagagaaaccctgaactggaatttcaagataaggtggatctcgatcggcttgtaaaggaggcgttcaatgagttccagaaggatcagtcgagactgaaggagatcgaaaagcaagacgacatgacatcgttttacaatacaccgcccctgggtaaacgcgggacatgttcgtatttgacgaaagccgtcatgaatttgttgctggagggtgaggtaaaacccaataatgacgatccctgcttgatctcctgataagctgccttctgcggggcttgccttctggccatgcccttcttctctcccttgcacctgtacctcttggtctttgaataaagcctgagtaggaag

SEQ ID NO: 21737 - RNA, 1736 nt, synthetic construct
  misc_feature 1..1736: note = source = /note="Description of Artificial Sequence: Synthetic transcript sequence"
  source 1..1736: mol_type = other RNA
gggaaataagagagaaaagaagagtaagaagaaatataagagccaccatgcttctggccgtcctttactgtctcttgtggtccttccagacatcggcgggacattttccaagggcgtgcgtatcgtcaaagaatctgatggaaaaggaatgttgtccaccctggtcaggagataggtccccttgcggccagttgtcaggtagaggaagctgtcagaacattcttctttcgaacgctccgttgggaccgcagttcccctttacgggtgtcgatgatcgcgaatcatggcccagcgtgttttacaacagaacgtgccaatgcagcgggaatttcatgggattcaactgcgggaactgcaagtttggcttttggggacccaactgcacggagcggcgactcctcgtacggcgaaacatctttgatctgtcagcgcccgagaaagacaagttcttcgcgtatcttactctggcaaaacataccatctcgagcgattacgtgatcccaatcggtacgtacggacagatgaagaatggatcgactcctatgttcaacgatatcaacatctacgatcttttcgtgtggatgcattactatgtctccatggatgccctcttgggaggatcggagatttggagagacattgactttgcgcacgaggcgcctgcgtttctgccttggcaccgcctgtttcttttgcgctgggagcaggagatccagaagctgactggggacgagaatttcaccatcccgtactgggattggagggacgcggaaaaatgtgatatttgcaccgatgaatacatgggtggccaacaccccacaaatcccaatctcctttcacccgcatccttcttttcgtcctggcagattgtctgttccaggctggaagagtataactcacaccagtccttgtgcaatggtaccccggaggggcctctccgccgcaatcccggaaatcacgacaaaagcaggacaccgcggctcccgtcctcggcagacgtggaattctgtctcagcttgacgcagtatgagtcggggtcgatggacaaggcagccaacttttcgttccggaatacgctcgaagggttcgcaagccccttgacagggatcgcggacgcaagccagtcgtcgatgcataacgcgctgcatatctacatgaatgggacaatgagccaggtgcaggggtcggctaacgacccgattttcctgctccaccacgccttcgtagacagcatttttgaacaatggttgcgacggcaccggccgttgcaagaggtctatccggaggccaacgccccgatcggtcacaacagggaatcatatatggtaccgtttatccctctgtatagaaatggtgacttcttcatcagctcgaaagaccttggctatgattactcctatctccaagattcggatccggactcattccaagactacattaagtcatatctcgagcaagcgtcgcgaatctggtcgtggttgctgggagcggccatggtcggggcagtgctgacggcgctgctcgccggtcttgtgtcgctgttgtgtcggcacaagagaaaacagctccccgaggagaagcagcccttgctcatggaaaaagaggattatcattcactttaccagtcgcatctgtgataataggctgccttctgcggggcttgccttctggccatgcccttcttctctcccttgcacctgtacctcttggtctttgaataaagcctgagtaggaag

SEQ ID NO: 21738 - RNA, 2060 nt, synthetic construct
  misc_feature 1..2060: note = source = /note="Description of Artificial Sequence: Synthetic transcript sequence"
  source 1..2060: mol_type = other RNA
gggaaataagagagaaaagaagagtaagaagaaatataagagccaccatgtcagagcggaaagaaggaaggggaaagggtaaagggaagaaaaaggaacgcggatcggggaagaaaccggaatcagccgctggctcacagtcgccggcactgccaccccggctcaaggagatgaagagccaggaatccgcggctgggtcgaagcttgtgttgagatgcgaaacgtccagcgagtactcatcacttcggtttaagtggtttaagaatggaaacgagctcaataggaagaacaagccccagaatatcaagatccagaagaaacccgggaaatccgaacttcggatcaacaaagcgtccctggcggactccggggagtacatgtgtaaagtcatcagcaaactcggtaacgattcagcctccgctaatatcacgatcgtcgagtcgaatgagatcattaccggtatgccggcgtccacggagggagcatatgtgtcgtcggaaagccccatcaggatttccgtgtcgactgaaggagcaaatacaagctcgtccaccagcacgagcacgacggggacgtcacatctcgtgaaatgcgccgaaaaggagaaaactttctgcgtcaatggtggagaatgcttcatggtgaaggatctttcaaacccctcccggtacctctgcaaatgtccgaacgagtttaccggggaccggtgtcagaactatgtaatggccagcttctataaagccgaagagctgtaccagaagcgagtgttgacgatcacaggcatctgcattgcactccttgtcgtaggaatcatgtgtgtggtggcgtattgcaaaacaaagaagcagcgcaaaaagttgcacgaccgactgcgccagtcgttgaggagcgagcgaaacaatatgatgaatattgcaaatgggccccatcacccgaacccgccacccgagaacgtacaactggtgaaccagtatgtctcgaaaaacgtcatctcgtcggaacatatcgtggaacgggaggcggaaacaagcttcagcacatcgcactacacgagcactgcccaccactccacgaccgtgacacagacgcccagccactcatggtcgaacggtcatacagagtcgatcctgtcagagtcccattcagtaattgtaatgtcgtccgtcgaaaattcaaggcactcaagccccacgggagggcctagaggccgcctcaacgggactggcggtcctcgagaatgtaattccttcttgagacacgcgagggaaacgcccgattcgtacagagattcaccccactcggagcgctatgtcagcgcgatgaccactcccgccagaatgtcgccggtggattttcatacaccttcgtcccctaagtcaccgcctagcgagatgtcgccgcctgtatcatccatgacagtgagcatgccctcgatggccgtgtcaccgtttatggaggaggaaaggcccctgttgttggtcacaccaccaagacttcgggagaaaaagttcgaccaccatccgcagcagttctcgtcgttccaccataatccggcgcacgatagcaactccctcccggcatcgcctctccggattgtcgaagatgaggagtacgaaacgacccaagaatacgaacccgcgcaagagccggtaaagaagctcgcaaatagcagaagggcgaaacgcaccaaaccaaacggacacattgcgaacaggcttgaggtcgacagcaatacctcgtcccagtcgtcaaactccgagagcgagacagaggacgagcgagtcggggaggacacaccttttctcggaatccaaaacccgcttgcagcgtcgttggaagccacgccagcgtttagacttgcggactcacggactaaccctgccggaaggttctcgacgcaagaggagattcaggctaggttgtcctcggtgattgctaatcaggaccccatcgccgtgtgataataggctgccttctgcggggcttgccttctggccatgcccttcttctctcccttgcacctgtacctcttggtctttgaataaagcctgagtaggaag
